(19) United States
(12) Patent Application Publication
(10) Pub. No.: US 2025/0179490 A1
(43) Pub. Date: Jun. 5, 2025

(54) METHODS OF TREATING GLAUCOMA

(71) Applicant: PYC Therapeutics Limited, Nedlands (AU)

(72) Inventors: Janya Grainok, Nedlands (AU); Lee Chai, Nedlands (AU); Quanqing Gao, Nedlands (AU)

(21) Appl. No.: 18/844,484

(22) PCT Filed: Mar. 23, 2023
(86) PCT No.: PCT/AU2023/050213

§ 371 Date: Sep. 6, 2024

(30) Foreign Application Priority Data
Mar. 23, 2022 (AU) 2022900727

(51) Int. Cl. C12N 15/113

(52) U.S. Cl. CPC C12N 15/113; C12N 2310/11; C12N 2310/321; C12N 2310/3233; C12N 2310/3513; C12N 2320/33

(57) ABSTRACT

The present disclosure generally relates to methods of treating, preventing and/or delaying progression of glaucoma in a subject, the method comprising administering an antisense oligonucleotide that modulates mRNA productive transcript, stability and/or translation of OPA1 gene transcript or part thereof.

### RELATED APPLICATION DATA

[0001] The present application claims priority from Australian Patent Application No. 2022900727 filed on 23 Mar. 2022 entitled “Methods of Treating Glaucoma”, the entire contents of which is hereby incorporated by reference.

### SEQUENCE LISTING

[0002] The present application is filed together with a Sequence Listing in electronic form. The entire contents of the Sequence Listing are hereby incorporated by reference.

### TECHNICAL FIELD

[0003] The present disclosure generally relates to methods of treating, preventing and/or delaying progression of glaucoma in a subject, the method comprising administering an antisense oligonucleotide that modulates mRNA translation, stability, and productive transcript of OPA1 gene transcript or part thereof.

### BACKGROUND

[0004] Glaucoma, a progressive optic neuropathy and the leading cause of blindness, is characterized by impairment or degeneration of retinal ganglion cells (RGCs), which transmit visual information to the brain. Currently, about 80 million people are affected by glaucoma worldwide, and this number is expected to increase to over 120 million by 2040. The prevalence of glaucoma increases with aging, and this increase is strongly affected by the African and Asian populations.

[0005] Glaucoma can be triggered when the aqueous humour builds up in the front part of the eye. Excess production or reduced draining of the aqueous humour increases the intraocular pressure (IOP), which irreversible damages the optic nerve and RGCs. Glaucoma can be classified as either primary or secondary, with secondary glaucoma attributable to another disorder or problem within the eye, such as injury, surgery, drugs, or other ocular diseases. Primary glaucoma is classified as open-angle glaucoma (POAG), normal-tension glaucoma (NTG), angle-closure glaucoma and congenital glaucoma. Secondary glaucoma is classified into neovascular glaucoma, pigmentary glaucoma, exfoliation glaucoma and uveitic glaucoma. In all subtypes of glaucoma, the gradual loss of RGCs is the hallmark. RGC dysfunction and death lead to vision impairment and ultimately blindness.

[0006] There is no approved treatment for glaucoma that directly targets RGCs. Of the drugs that have been clinically studied for neuroprotective activity and to reduce vision loss in POAG patients, e.g. brimonidine and memantine, none have conclusively proven effective thus far. Instead, the only available treatments to reduce IOP levels are indirectly protective for RGCs. Further, it has been reported that in about one-third of cases of glaucoma the characteristic optic nerve changes and visual field loss can develop in an eye with normal IOP levels. Therefore, there is an urgent need to identify therapeutic strategies for RGC neuroprotection to limit the projected burden of vision impairment and blindness from glaucoma. The use of neurotrophic factors such as brain derived-, ciliary derived-, glial cell derived, and nerve growth factor has been a focus of recent research for it is known to prevent uncontrolled RGCs loss and aid to the cell viability. However, their effectiveness is limited by a relatively short half-life, insufficient permeability, and poor concentrations in target RGCs.

[0007] Therefore, there remains a need for new interventions for treating, preventing and/or delaying progression of glaucoma.

### SUMMARY

[0008] In producing the present invention, the inventors identified optic atrophy gene 1 (OPA1) as a potential target for pharmacological intervention for treating or preventing glaucoma. The inventors have identified antisense oligonucleotides (ASOs) that increase expression of OPA1 expression that are useful for the treatment or prevention of glaucoma. The inventors have identified ASOs that rely on any of a variety of mechanisms of action to upregulate OPA1 expression. For example, an ASO identified by the inventors increase OPA1 expression by:
[0009] Binding to an OPA1 gene pre-mRNA in a cell to promote exclusion of a nonsense-mediated RNA decay-inducing (NMD) exon during splicing of the OPA1 pre-mRNA to increase the level of OPA1 mRNA transcripts encoding full length, functional OPA1
[0010] Binding to the 5′ untranslated region (UTR) of an OPA1 gene transcript in a cell to increase translation efficiency and/or transcript stability of an OPA1 mRNA
[0011] Binding to the 3′ UTR of an OPA1 gene transcript in a cell to increase transcript stability of an OPA1 mRNA

[0012] These findings additionally provide the basis for methods of treating, preventing and/or delaying progression of glaucoma.

[0013] Accordingly, the present disclosure provides a method of treating, preventing and/or delaying progression of glaucoma in a subject, the method comprising administering an antisense oligonucleotide that increases functional OPA1 protein levels in the subject. For example, the level of OPA1 protein is increased in the subject compared to the level in the subject prior to administration of the OPA1.

[0014] In one example, the ASO increases the level of OPA1 mRNA and the amount of functional OPA1 protein in a cell and/or a tissue of the subject. For example, the ASO increases the level of OPA1 mRNA in a cell and/or a tissue of the subject. In another example, the ASO increases the amount of functional OPA1 protein in a cell and/or a tissue of the subject.

[0015] In one example, the amount of functional OPA1 protein in the cell and/or the tissue is increased by about 1.1 to about 10-fold. For example, the amount of functional OPA1 protein in the cell and/or the tissue is increased by about 1.5 to about 10-fold, about 2 to about 10-fold, about 3 to about 10-fold, about 4 to about 10-fold, about 1.1 to about 5-fold, about 1.1 to about 6-fold, about 1.1 to about 7-fold, about 1.1 to about 8-fold, about 1.1 to about 9-fold, about 2 to about 5-fold, about 2 to about 6-fold, about 2 to about 7-fold, about 2 to about 8-fold, about 2 to about 9-fold, about 3 to about 6-fold, about 3 to about 7-fold, about 3 to about 8-fold, about 3 to about 9-fold, about 4 to about 7-fold, about 4 to about 8-fold, about 4 to about 9-fold, at least about 1.1-fold. For example, the amount of functional OPA1 protein in the cell and/or the tissue is increased by at least about 1.5-fold, at least about 2-fold, at least about 2.5-fold, at least about 3-fold, at least about 3.5-fold, at least about 4-fold, at least about 5-fold, or at least about 10-fold. For example, the amount of functional OPA1 protein in the cell and/or the tissue is increased compared to the level in the tissue prior to the administration or contact. In one example, administration to a subject or contact with cells with any of the ASOs or pharmaceutical compositions disclosed herein increases the level of OPA1 protein about 1.1 to about 2.5-fold compared to the level in the tissue prior to the administration or contact.

[0016] In one example, the cell and/or tissue is selected from the group consisting of an ocular tissue, retinal pigment epithelium (RPE) cells, Müller glial cells, endothelial cells, glial cells, astrocytes, photoreceptors. For example, the cell and/or tissue is selected from the group consisting of the retina, RPE cells and combinations thereof.

[0017] In one example, the ASOs bind to a targeted portion of:
[0018] (i) an OPA1 gene pre-mRNA in a cell to promote exclusion of a nonsense-mediated RNA decay-inducing (NMD) exon during splicing of the OPA1 pre-mRNA to increase the level of OPA1 mRNA transcripts encoding full length, functional OPA1;
[0019] (ii) the 5′ untranslated region (UTR) of an OPA1 gene transcript in a cell to increase translation efficiency of an OPA1 mRNA;
[0020] (iii) the 5′ UTR of an OPA1 gene transcript in a cell to increase transcript stability, e.g., by inhibiting the activity of a decapping enzyme; and/or
[0021] (iv) the 3′ UTR of an OPA1 gene transcript in a cell to increase transcript stability, e.g., by preventing binding of a miRNA to the 3′ UTR.

[0022] In one example, the ASOs binds to a targeted portion of an OPA1 pre-mRNA in a cell to promote exclusion of a NMD exon during splicing of the OPA1 pre-mRNA to increase the level of OPA1 mRNA transcripts encoding full length, functional OPA1.

[0023] In one example, the ASO binds to a targeted portion of intron 7 OPA1 pre-mRNA. Exemplary ASOs bind within a targeted portion of OPA1 pre-mRNA nucleotide sequence corresponding to one or more of SEQ ID NO:1.

[0024] In one example, the ASO binds to intron 7 of an OPA1 gene pre-mRNA in a cell and increases the level of OPA1 gene transcripts encoding full length, functional OPA1 by exclusion of NMD exon 7×. For example, the ASO is within sufficient proximity to an acceptor site of exon 7× to promote exclusion of exon 7× in splicing of OPA1 mRNA.

[0025] In one example, the ASO that binds to a targeted portion of intron 7 OPA1 pre-mRNA comprises or consists of any one of SEQ ID NOs: 2-54.

[0026] In one example, the ASO that binds to a targeted portion of intron 7 OPA1 pre-mRNA comprises or consists of any one of SEQ ID NOs: 2-54 or SEQ ID NOs: 2491-2503.

[0027] In one example, the ASO that binds to a targeted portion of intron 7 OPA1 pre-mRNA comprises or consists of any one of SEQ ID NOs: 2491-2503 In one example, the ASO binds to a targeted portion of the 5′ UTR of an OPA1 gene transcript in a cell to increase translation efficiency or transcript stability of an OPA1 mRNA. For example, the ASO increases expression of OPA1 protein. Without being bound by theory or mode of action, such ASOs may sterically inhibit translation from upstream Open Reading Frames (uORF) start site and/or sterically inhibit secondary structure in the 5′ UTR and/or inhibiting the activity of a decapping enzyme.

[0028] In one example, the ASO binds within a targeted portion of the 5′ UTR of OPA1 mRNA, wherein the targeted portion is within the nucleotide sequence corresponding to SEQ ID NO: 55.

[0029] In one example, the ASO that binds to a targeted portion of the 5′ UTR of OPA1 mRNA comprises or consists of any one of SEQ ID NOs: 56-138.

[0030] In one example, the ASO that binds to a targeted portion of the 5′ UTR of OPA1 mRNA comprises or consists of SEQ ID NO: 112.

[0031] In one example, the ASO binds to a targeted portion of the 3′ UTR of an OPA1 gene transcript in a cell to increase transcript stability of an OPA1 mRNA. For example, the ASO increases expression of OPA1 protein. Without being bound by theory or mode of action, such ASOs may sterically inhibit binding of a miRNA to the 3′ UTR.

[0032] In one example, the ASO binds within a targeted portion of the 3′ UTR of OPA1 mRNA, wherein the targeted portion is within the nucleotide sequence corresponding to SEQ ID NO: 139.

[0033] In one example, the ASO that binds to a targeted portion of the 3′ UTR of OPA1 mRNA comprises or consists of any one of SEQ ID NOs: 140-2488.

[0034] In one example, the nucleotide sequence of the ASO is at least 60%, 65%, 70%, 75%, 80%, 85%, 90%, 95%, or 100% complementary to the nucleotide sequence of the targeted portion over the length of the ASO.

[0035] In one example, the ASO comprises a backbone modification. For example, the backbone modification comprises a phosphorothioate linkage or a phosphorodiamidate linkage. In one example, the ASO comprises a phosphorothioate linkage. In another example, the ASO comprises a phosphorodiamidate linkage.

[0036] In one example, the ASO comprises a phosphorodiamidate morpholino, a locked nucleic acid, a peptide nucleic acid, a 2-O-methyl, a 2′-Fluoro, or a 2′-O-methoxyethyl moiety. For example, the ASO comprises a phosphorodiamidate morpholino moiety. In another example, the ASO comprises a locked nucleic acid. In a further example, the ASO comprises a 2-O-methyl moiety. In one example, the ASO comprises a 2′-Fluoro moiety. In another example, the ASO comprises a 2′-O-methoxyethyl moiety.

[0037] In one example, the ASO comprises at least one modified sugar moiety. For example, each sugar moiety in the antisense oligonucleotide is a modified sugar moiety.

[0038] In one example, the ASO comprises a 2′-O-methoxyethyl moiety. For example, each nucleotide of the ASO comprises a 2′-O-methoxyethyl moiety.

[0039] In one example, the nucleotide sequence of the ASO consists of 10 to 50 nucleotides, 15 to 40 nucleotides, 18 to 40 nucleotides, 17 to 25 nucleotides, 20 to 35 nucleotides, 20 to 30 nucleotides, 22 to 30 nucleotides, 22 to 28 nucleotides, 24 to 30 nucleotides, 25 to 30 nucleotides, or 26 to 30 nucleotides. In one example, the nucleotide sequence of the ASO consists of 20 to 30 nucleotides. For example, the nucleotide sequence of the ASO consists of 17 nucleotides. In one example, the nucleotide sequence of the ASO consists of 19 nucleotides. In another example, the nucleotide sequence of the ASO consists of 21 nucleotides. In a further example, the nucleotide sequence of the ASO consists of 22 nucleotides. In one example, the nucleotide sequence of the ASO consists of 23 nucleotides. In another example, the nucleotide sequence of the ASO consists of 24 nucleotides. In another example, the nucleotide sequence of the ASO consists of 25 nucleotides. In another example, the nucleotide sequence of the ASO consists of 26 nucleotides. In another example, the nucleotide sequence of the ASO consists of 27 nucleotides. In another example, the nucleotide sequence of the ASO consists of 28 nucleotides. In another example, the nucleotide sequence of the ASO consists of 29 nucleotides. In another example, the nucleotide sequence of the ASO consists of 30 nucleotides.

[0040] In one example, the ASO comprises one or more phosphorodiamidate morpholino moieties.

[0041] In one example of any method described herein, the ASO is linked to a functional moiety. The functional moiety can be covalently linked or non-covalently linked to the ASO. The functional moiety can be at the 5′ end and/or 3′ end of the ASO.

[0042] In some examples, the functional moiety comprises a delivery moiety. For example, the delivery moiety is selected from the group consisting of lipids, peptides, carbohydrates, and antibodies. An exemplary delivery moiety comprises a cell-penetrating peptide (CPP). The present disclosure additionally contemplates delivery moieties such as a N-acetylgalactosamine (GalNAc) moiety, a fatty acid moiety, or a lipid moiety.

[0043] In some examples, the functional moiety comprises a stabilising moiety.

[0044] The present disclosure additionally provides a pharmaceutical composition comprising an ASO of the disclosure, and a pharmaceutically acceptable excipient, for use in any method of the disclosure.

[0045] In one example, the ASO is complexed with a delivery nanocarrier. For example, the delivery nanocarrier is selected from the group consisting of: lipoplexes, liposomes, exosomes, inorganic nanoparticles, and DNA nanostructures. In one example, the delivery nanocarrier comprises a lipid nanoparticle (LNP) encapsulating the antisense oligonucleotide.

[0046] In one example of any method described herein, the ASO is formulated for a route of administration selected from the group consisting of intravitreal, suprachoroidal, subretinal, ciliary intramuscular, intravenous, intra-arterial, subcutaneous, and topical routes.

[0047] The present disclosure also provides use of an ASO in the manufacture of a medicament for treating, preventing and/or delaying progression of glaucoma in a subject, wherein the ASO modulates mRNA translation of the OPA1 gene transcript or part thereof.

[0048] The disclosure also provides a modified cell comprising an ASO of the disclosure for use in any method described herein. For example, the modified cell is a mammalian cell, such as a human cell.

[0049] The disclosure additionally provides an ASO that binds to a targeted portion of the intron 7× of an OPA1 gene transcript in a cell and increases the level of OPA1 gene transcripts encoding full length, functional OPA1 by exclusion of NMD exon 7×. For example, the ASO comprises or consists of any one of SEQ ID NOs: 2-54. In one example, the ASO comprises or consists of any one of SEQ ID NOs: 2-54 or SEQ ID NOs: 2491-2503. In another example, the ASO comprises or consists of any one of SEQ ID NOs: 2491-2503.

[0050] The disclosure additionally provides an ASO that binds to a targeted portion of the 5′ UTR of an OPA1 gene transcript in a cell and increases transcript stability of an OPA1 mRNA, e.g., by inhibiting the activity of a decapping enzyme.

[0051] In one example, the ASO comprises or consists of any one of SEQ ID NOs: 56-138.

[0052] The disclosure additionally provides an ASO that binds to a targeted portion of the 3′ UTR of an OPA1 gene transcript in a cell and increases transcript stability of an OPA1 mRNA, e.g., sterically inhibiting binding of a miRNA to the 3′ UTR.

[0053] In one example, the ASO binds within a targeted portion of the 3′ UTR of OPA1 mRNA, wherein the targeted portion is within the nucleotide sequence corresponding to SEQ ID NO: 139.

[0054] In one example, the ASO that binds to a targeted portion of the 3′ UTR of OPA1 mRNA comprises or consists of any one of SEQ ID NOs: 140-2488.

[0055] The present disclosure additionally provides a method of treating a condition, the method comprising administering an ASO of the disclosure. In one example, the condition is associated with OPA1 expression, e.g., reduced OPA1 expression. In one example, the condition is glaucoma. In another example, the condition is autosomal dominant optic atrophy.

### BRIEF DESCRIPTION OF THE DRAWINGS

[0056] FIG. 1 includes a series of graphical representations showing the binding sites for ASOs that increase OPA1 protein levels. (A) Schematic illustration of exon structure of OPA1 (Transcript ID: ENST00000361510), indicating start and stop codons and the regions of 5′ UTR, NMD exon 7× (in case of unspliced) and 3′ UTR. (B) Prediction for secondary structure of the 5′ UTR of OPA1 transcript (corresponding to SEQ ID NO: 55) using RNAfold web tool (http://ma.tbi.univie.ac.at/cgi-bin/RNAWebSuite/RNAfold.cgi). The free energy of the thermodynamic ensemble is −137.26 kcal/mol. ASOs 56-138 were designed, which target start codons of upstream open reading frames (uORFs), regulatory binding sites, inhibitory 5′ UTR secondary structures and/or G-quadruplexes. (C) Exon 7× (black box) containing the premature termination codon (PTC), is located between exons 7 and 8 (not drawn to scale). ASOs (SEQ ID NOs: 2-54) were designed to target splicing regulatory elements within intron 7 (dash line, corresponding to SEQ ID NO: 1) to mediate exclusion of exon 7× during pre-mRNA splicing to increase productive OPA1 transcript. (D) Schematic illustration of the 3′ UTR (not drawn to scale) located in exon 31. ASOs were designed to hybridize with the transcript and mask/inhibit binding of miRNA(s) to prevent mRNA degradation and increase in OPA1 protein levels.

[0057] FIG. 2 shows screening of PMOs (25 and 50 μM) in ADOA patient fibroblasts. Patient fibroblasts were transfected for 48 hr with PMOs targeting removal of the OPA1 exon 7× as indicated. OPA1 transcript expression was assessed by digital droplet PCR (ddPCR) and normalised to GAPDH, RPL27 and SCL25A3 transcript levels. The OPA1 expression in untreated cells was set to 1.

[0058] FIG. 3 shows screening of PMOs (50 and 100 μM) in ADOA patient fibroblasts. (A) The western blot gel image shows expression of long and short OPA1 isoforms in patient fibroblasts transfected with PMOs targeting intron 7 of the OPA1 transcript at 48 hr. (B) The band intensity of OPA1 expression was normalised to beta-actin (assessed by ImageJ™). The OPA1 expression in untreated cells was set to 1.

[0059] FIG. 4 is a schematic of the refinement of antisense oligonucleotides to improve OPA1 upregulation. (A) Illustration of OPA1 exons and the location of exon7× exists in the transcript. (B) Binding region of parental PMOs on OPA1 transcript upstream of exon7×. Exon 7× is not drawn to scale. (C) Binding region of daughter sequences with microwalk, nucleotide base substitution and lengthening to improve the efficacy of PMOs.

[0060] FIG. 5 shows screening of cell penetrating peptide-conjugated PMOs (PPMOs) (5, 10 and 20 μM) in ADOA patient fibroblasts. ADOA patient fibroblasts were transfected for 5 days with PPMOs targeting intron 7 of the OPA1 transcript as indicated. OPA1 transcript expression was assessed by ddPCR and normalised to HPRTL. The OPA1 expression in untreated cells was set to 1.

[0061] FIG. 6 shows screening of PMOs targeting exon 7× exclusion (25 and 50 μM) in ADOA patient fibroblasts. Patient fibroblasts were transfected in triplicates for 48 hr with PMOs targeting removal of the OPA1 exon 7× as indicated. Experiments were performed in 1-4 biological replicates as indicated with the number of data points within a bar graph. OPA1 transcript expression was assessed by ddPCR and normalised to the HPRT1 transcript level. The OPA1 expression in untreated cells was set to 1.

[0062] FIG. 7 shows screening of 5′ UTR PMOs (25 and 50 μM) in ADOA patient fibroblasts. PMOs with SEQ ID NOs: 78, 112 and 2500-2503 were transfected into ADOA patient fibroblasts in triplicates for 72 hr with PMOs targeting the 5′ UTR of an OPA1 mRNA. Western blot analysis was used to determine the upregulation of OPA1 protein in PMO-treated cells. The band intensity of OPA1 expression was normalised to HPRT1 (assessed by ImageJ™). The OPA1 expression in untreated cells was set to 1. PMOs SEQ ID NOs: 78, 112 and 2502 significantly increased OPA1 protein upregulation (greater than 1.3 fold) in patient fibroblasts. Student's t test was used for statistical analysis.

[0063] FIG. 8 shows the PMO OPA1 H1A(+10+32)1 mm10C>T (SEQ ID NO: 112) was conjugated with CPP for enhanced cell penetrating ability. The CPP-PMO (or PPMO) was incubated for 7 days to dermal skin fibroblasts derived from ADOA patients containing OPA1 mutations c. 2708_2711delTTAG (patient 1) and c.985-1G>A (patient 2). The efficacy of PPMO-induced OPA1 upregulation was assessed using western blot assay. The results showed significant OPA1 protein upregulation in a dose dependent manner in 2 patients with distinct OPA1 mutations. Student's t test was used for statistical analysis.

[0064] FIG. 9 shows the mitochondrial functional improvement following PPMO treatment in ADOA patient-derived fibroblasts. A PMO OPA1 H1A(+10+32)1 mm10C>T (SEQ ID NO: 112) was incubated to fibroblasts for 7 days in a 6-well plate format. Upon day 7, cells were trysinised and reseeded into a 96-well plate at 8,000 cells/well and incubated in glucose-depleted DMEM cell culture media supplemented with 2.5 mM 2-deoxy-D-glucose and 5 mM pyruvate for 18 hrs. A CellTiter-Glo® assay was used to assess mitochondrial ATP and calculate the concentration of ATP according to a standard curve using (14.7-10,000 nM of ATP standard dilutions (ThermoFisher). Student's t test was used for statistical analysis.

[0065] FIG. 10 shows the PMO OPA1 H1A(+10+32)1 mm10C>T (SEQ ID NO: 112) enhance OPA1 protein upregulation in enriched iPSC-derived RGCs obtained from an ADOA patient harbouring OPA1 c.985-1G>A mutation. iPSC-RGCs were incubated with PPMO for 5 days prior to protein harvest. The efficacy of PPMO-induced OPA1 upregulation was assessed using western blot assay and normalised to beta-actin expression. The results showed significant OPA1 protein upregulation at 10 μM. Student's t test was used for statistical analysis.

### DETAILED DESCRIPTION

### General

[0066] Throughout this specification, unless specifically stated otherwise or the context requires otherwise, reference to a single step, composition of matter, group of steps or group of compositions of matter shall be taken to encompass one and a plurality (i.e. one or more) of those steps, compositions of matter, groups of steps or groups of compositions of matter. Thus, as used herein, the singular forms “a”, “an” and “the” include plural aspects unless the context clearly dictates otherwise. For example, reference to “a” includes a single as well as two or more; reference to “an” includes a single as well as two or more; reference to “the” includes a single as well as two or more and so forth.

[0067] Those skilled in the art will appreciate that the present disclosure is susceptible to variations and modifications other than those specifically described. It is to be understood that the disclosure includes all such variations and modifications. The disclosure also includes all of the steps, features, compositions and compounds referred to or indicated in this specification, individually or collectively, and any and all combinations or any two or more of said steps or features.

[0068] The present disclosure is not to be limited in scope by the specific examples described herein, which are intended for the purpose of exemplification only. Functionally-equivalent products, compositions and methods are clearly within the scope of the present disclosure.

[0069] Any example of the present disclosure herein shall be taken to apply mutatis mutandis to any other example of the disclosure unless specifically stated otherwise. Stated another way, any specific example of the present disclosure may be combined with any other specific example of the disclosure (except where mutually exclusive).

[0070] Any example of the present disclosure disclosing a specific feature or group of features or method or method steps will be taken to provide explicit support for disclaiming the specific feature or group of features or method or method steps.

[0071] Unless specifically defined otherwise, all technical and scientific terms used herein shall be taken to have the same meaning as commonly understood by one of ordinary skill in the art (for example, molecular biology, microbiology, virology, recombinant DNA technology, peptide synthesis in solution, solid phase peptide synthesis, and immunology).

[0072] Unless otherwise indicated, the conventional techniques of molecular biology, microbiology, virology, recombinant DNA technology, peptide synthesis in solution, solid phase peptide synthesis, and immunology utilized in the present disclosure are standard procedures, well known to those skilled in the art. Such techniques are described and explained throughout the literature in sources such as, J. Perbal, A Practical Guide to Molecular Cloning, John Wiley and Sons (1984), J. Sambrook et al. Molecular Cloning: A Laboratory Manual, Cold Spring Harbour Laboratory Press (1989), T. A. Brown (editor), Essential Molecular Biology: A Practical Approach, Volumes 1 and 2, IRL Press (1991), D. M. Glover and B. D. Hames (editors), DNA Cloning: A Practical Approach, Volumes 1-4, IRL Press (1995 and 1996), and F. M. Ausubel et al. (editors), Current Protocols in Molecular Biology, Greene Pub. Associates and Wiley-Interscience (1988, including all updates until present), Ed Harlow and David Lane (editors) Antibodies: A Laboratory Manual, Cold Spring Harbour Laboratory, (1988), and J. E. Coligan et al. (editors) Current Protocols in Immunology, John Wiley & Sons (including all updates until present).

[0073] The term “and/or”, e.g., “X and/or Y” shall be understood to mean either “X and Y” or “X or Y” and shall be taken to provide explicit support for both meanings or for either meaning.

[0074] The term “about”, unless stated to the contrary, refers to +/−20%, more preferably +/−10%, of the designated value. For the avoidance of doubt, the term “about” followed by a designated value is to be interpreted as also encompassing the exact designated value itself (for example, “about 10” also encompasses 10 exactly).

[0075] Throughout this specification the word “comprise”, or variations such as “comprises” or “comprising”, will be understood to imply the inclusion of a stated element, integer or step, or group of elements, integers or steps, but not the exclusion of any other element, integer or step, or group of elements, integers or steps.

### Selected Definitions

[0076] The term “antisense oligonucleotide” “antisense oligomer” or “ASO,” as used herein, encompasses oligonucleotides and any other oligomeric molecule that comprises nucleobases capable of hybridizing to a complementary sequence on a target RNA transcript, but does not comprise a sugar moiety, such as in the case of a peptide nucleic acid (PNA). Preferably, the ASO is an ASO that is resistant to nuclease cleavage or degradation.

[0077] The phrase “binds to a targeted portion” or “binds within a targeted portion,” in reference to an ASO, as used herein, refers to specific hybridization between the ASO nucleotide sequence and a target nucleotide sequence that is complementary within the ranges set forth herein. In some examples, specific hybridization occurs where, under ex vivo conditions, the hybridization occurs under high stringency conditions. By “high stringency conditions” is meant that the ASO, under such ex vivo conditions, hybridize to a target sequence in an amount that is detectably stronger than non-specific hybridization. High stringency conditions, then, are conditions that distinguish a polynucleotide with an exact complementary sequence, or one containing only a few scattered mismatches from a random sequence that happened to have a few small regions (e.g., 1-5 bases) that matched the probe. Such small regions of complementarity are more easily melted than a full-length complement of 12-17 or more bases, and moderate stringency hybridization makes them easily distinguishable. In one example, high stringency conditions include, for example, low salt and/or high temperature conditions, such as provided by about 0.02-0.1 M NaCl or the equivalent, at temperatures of about 50-70° C. The skilled person will appreciate that under in vivo conditions, the specificity of hybridization between an ASO and its target sequence is defined in terms of the level of complementarity between the ASO and the target sequence to which it hybridizes within a cell.

[0078] The term “nonsense-mediated RNA decay-inducing (NMD) exon” or “NMD exon” refers to an exon or a pseudo-exon that is a region within an intron and can activate the NMD pathway if included in a mature RNA transcript. In the constitutive splicing events, the intron containing an NMD exon is usually spliced out, but the intron or a portion of it can be retained during alternative or aberrant splicing events. Mature mRNA transcripts containing such an NMD exon can be non-productive due to a frame shift which induces the NMD pathway. Inclusion of an NMD exon in mature OPA1 RNA transcripts can downregulate overall OPA1 mRNA and OPA1 protein expression.

[0079] The term “precursor mRNA” or “pre-mRNA” refers to the primary transcript is the single-stranded RNA product synthesized by transcription of the genomic DNA sequence of the transcription unit for a particular gene, which generally encompasses the nucleotide sequence between a transcription start site and a termination signal.

[0080] The term “peptide” is intended to include compounds composed of amino acid residues linked by amide bonds. A peptide may be natural or unnatural, ribosome encoded or synthetically derived. Typically, a peptide will consist of between 2 and 200 amino acids. For example, the peptide may have a length in the range of 10 to 20 amino acids or 10 to 30 amino acids or 10 to 40 amino acids or 10 to 50 amino acids or 10 to 60 amino acids or 10 to 70 amino acids or 10 to 80 amino acids or 10 to 90 amino acids or 10 to 100 amino acids, including any length within said range(s). The peptide may comprise or consist of fewer than about 150 amino acids or fewer than about 125 amino acids or fewer than about 100 amino acids or fewer than about 90 amino acids or fewer than about 80 amino acids or fewer than about 70 amino acids or fewer than about 60 amino acids or fewer than about 50 amino acids.

[0081] Peptides, as referred to herein, include “inverso” peptides in which all L-amino acids are substituted with the corresponding D-amino acids, “retro-inverso” peptides in which the sequence of amino acids is reversed and all L-amino acids are replaced with D-amino acids.

[0082] Peptides may comprise amino acids in both L- and/or D-form. For example, both L- and D-forms may be used for different amino acids within the same peptide sequence. In some examples the amino acids within the peptide sequence are in L-form, such as natural amino acids. In some examples the amino acids within the peptide sequence are a combination of L- and D-form. Further, peptides may comprise unusual, but naturally occurring, amino acids including, but not limited to, hydroxyproline (Hyp), beta-alanine, citrulline (Cit), ornithine (Orn), norleucine (Nle), 3-nitrotyrosine, nitroarginine, pyroglutamic acid (Pyr). Peptides may also incorporate unnatural amino acids including, but not limited to, homo amino acids, N-methyl amino acids, alpha-methyl amino acids, beta (homo) amino acids, gamma amino acids, and N-substituted glycines. Peptides may be linear peptides or cyclic peptides.

[0083] The term “protein” shall be taken to include a single polypeptide chain, i.e., a series of contiguous amino acids linked by peptide bonds or a series of polypeptide chains covalently or non-covalently linked to one another (i.e., a polypeptide complex). For example, the series of polypeptide chains can be covalently linked using a suitable chemical bond or a disulfide bond. Examples of non-covalent bonds include hydrogen bonds, ionic bonds, Van der Waals forces, and hydrophobic interactions.

[0084] Percentage amino acid sequence identity with respect to a given amino acid sequence is defined as the percentage of amino acid residues in a candidate sequence that are identical to the amino acid residues in the reference sequence, after aligning the sequences and introducing gaps, if necessary, to achieve the maximum percent sequence identity, and not considering any conservative substitutions as part of the sequence identity. Amino acid sequence identity may be determined using the EMBOSS Pairwise Alignment Algorithms tool available from The European Bioinformatics Institute (EMBL-EBI), which is part of the European Molecular Biology Laboratory. This tool is accessible at the website located at www.ebi.ac.uk/Tools/emboss/align/. This tool utilizes the Needleman-Wunsch global alignment algorithm (Needleman and Wunsch, 1970). Default settings are utilized which include Gap Open: 10.0 and Gap Extend 0.5. The default matrix “Blosum62” is utilized for amino acid sequences and the default matrix.

[0085] The term “cell penetrating peptide” (CPP) refers to a peptide that is capable of crossing a cellular membrane. In one example, a CPP is capable of translocating across a mammalian cell membrane and entering into a cell. In another example, a CPP may direct a conjugate to a desired subcellular compartment. Thus, a CPP may direct or facilitate penetration of a molecule of interest across a phospholipid, mitochondrial, endosomal, lysosomal, vesicular, or nuclear membrane. A CPP may be translocated across the membrane with its amino acid sequence complete and intact, or alternatively partially degraded.

[0086] A CPP may direct a molecule of interest, such as an antisense oligonucleotide disclosed herein, from outside a cell through the plasma membrane, and into the cytoplasm or a desired subcellular compartment. Alternatively, or in addition, a CPP may direct a molecule of interest across the blood-brain, trans-mucosal, hematoretinal, skin, gastrointestinal and/or pulmonary barriers.

[0087] The term “peptide ligand” or “receptor binding domain” refers to a peptide that is capable of binding to a membrane surface receptor to enable translocation of the peptide across a cellular membrane. In one example a peptide ligand may enable translocation across the cellular membrane via the natural endocytosis of the targeted receptor. In another example the peptide ligand may utilise a complementary mechanism of translocation across the cellular membrane including utilising a conjugated CPP. In one example, a peptide ligand is capable of translocating across a mammalian cell membrane and to enter a cell. In another example, a peptide ligand may direct a conjugate to a desired subcellular compartment. Thus, a peptide ligand may direct or facilitate cellular uptake of a molecule of interest across a phospholipid, mitochondrial, endosomal, lysosomal, vesicular, or nuclear membrane. A peptide ligand may be translocated across the membrane with its amino acid sequence complete and intact, or alternatively partially degraded.

[0088] A peptide ligand via its binding to a target receptor may direct a molecule of interest, such as an ASO disclosed herein, from outside a cell through the plasma membrane, and into the cytoplasm or a desired subcellular compartment. Alternatively, or in addition, a peptide ligand via its binding to a target receptor may direct a molecule of interest across a relevant biological barrier, e.g., the blood-brain, trans-mucosal, hematoretinal, skin, gastrointestinal, and/or pulmonary barriers.

### Methods of Treating or Preventing Glaucoma

[0089] The present disclosure provides, for example, a method of treating, preventing and/or delaying progression of glaucoma in a subject. The methods described herein include a method for treating, preventing and/or delaying progression of glaucoma in a subject in need thereof by administering to the subject a therapeutically effective amount of a pharmaceutical composition comprising any of the ASOs disclosed herein. Likewise, in some examples, any of the ASOs herein are used in the manufacture of a medicament for treating, preventing and/or delaying progression of glaucoma.

[0090] Glaucoma is a group of eye diseases that result in vision loss. It is typically caused by an increase in intraocular pressure (IOP) which can result in damage to the optic nerve. Glaucoma can be classified as either primary or secondary, with secondary glaucoma attributable to another disorder or problem within the eye, such as injury, surgery, drugs, or other ocular diseases. Primary glaucoma is classified as open-angle glaucoma (POAG), normal-tension glaucoma (NTG), angle-closure glaucoma and congenital glaucoma. Secondary glaucoma is classified into neovascular glaucoma, pigmentary glaucoma, exfoliation glaucoma and uveitic glaucoma.

[0091] In one example of the methods of the present disclosure, the glaucoma is primary glaucoma. For example, the primary glaucoma is open-angle glaucoma (POAG), normal-tension glaucoma (NTG), angle-closure glaucoma or congenital glaucoma.

[0092] In one example, the primary glaucoma is open-angle glaucoma (POAG).

[0093] In one example, the primary glaucoma is normal-tension glaucoma (NTG).

[0094] In one example, the primary glaucoma is angle-closure glaucoma.

[0095] In one example, the primary glaucoma is congenital glaucoma.

[0096] In one example of the methods of the present disclosure, the glaucoma is secondary glaucoma. For example, the secondary glaucoma is neovascular glaucoma, pigmentary glaucoma, exfoliation glaucoma or uveitic glaucoma.

[0097] In one example, the secondary glaucoma is neovascular glaucoma.

[0098] In one example, the secondary glaucoma is pigmentary glaucoma.

[0099] In one example, the secondary glaucoma is exfoliation glaucoma.

[0100] In one example, the secondary glaucoma is uveitic glaucoma.

[0101] In one example, the subject to be treated is suffering from glaucoma. For example, the subject has been diagnosed as having or suffering from glaucoma. In one example, the subject suffers from glaucoma. For example, the subject is in need of treatment. Such subjects can be administered the ASOs as described here to treat or prevent the progression of glaucoma.

[0102] In one example, administration of an ASO as described herein slows progression of glaucoma.

[0103] In one example, the subject is at risk of developing glaucoma. Such subjects can be administered the ASOs as described here to prevent onset of glaucoma.

[0104] As used herein, the term “at risk” means that the subject has an increased chance of developing glaucoma compared to a normal individual. Subjects can be identified as at risk of developing glaucoma using any method known in the art and/or those described herein. For example, the subject may be identified at risk of developing glaucoma if that subject has one or more common risk factors including family history, high eye pressure, diabetes, high or low blood pressure and prolonged use of steroidal medication.

[0105] Also provided herein is a method for increasing the OPA1 protein in a cell, the method comprising contacting the cell with a composition or pharmaceutical composition, as disclosed herein, whereby the amount of OPA1 protein in the cell is increased. Also provided herein is a method for increasing the level of OPA1 protein in a cell, ex vivo or in a tissue in vivo, the method comprising contacting the cell with an ASO or pharmaceutical composition, as disclosed herein, whereby the amount of OPA1 protein in the cell is increased. In some examples, the cell is a retinal cell. In some examples, the tissue is a retinal tissue, e.g., retina and/or retinal pigment epithelium.

[0106] In some examples, administration to a subject or contact with cells with any of the ASOs or pharmaceutical compositions disclosed herein increases the level of OPA1 protein about 1.1 to about 10-fold, e.g., 1.5 to about 10-fold, about 2 to about 10-fold, about 3 to about 10-fold, about 4 to about 10-fold, about 1.1 to about 5-fold, about 1.1 to about 6-fold, about 1.1 to about 7-fold, about 1.1 to about 8-fold, about 1.1 to about 9-fold, about 2 to about 5-fold, about 2 to about 6-fold, about 2 to about 7-fold, about 2 to about 8-fold, about 2 to about 9-fold, about 3 to about 6-fold, about 3 to about 7-fold, about 3 to about 8-fold, about 3 to about 9-fold, about 4 to about 7-fold, about 4 to about 8-fold, about 4 to about 9-fold, at least about 1.1-fold, at least about 1.5-fold, at least about 2-fold, at least about 2.5-fold, at least about 3-fold, at least about 3.5-fold, at least about 4-fold, at least about 5-fold, or at least about 10-fold compared to the level in the tissue prior to the administration or contact.

[0107] Suitable routes of administration for treatment with the compositions, pharmaceutical compositions, or medicaments disclosed herein include, but are not limited to, intravitreal, suprachoroidal, subretinal, ciliary intramuscular, intravenous, intra-arterial, subcutaneous, and topical.

[0108] In some examples administration is into the eye by an intravitreal, suprachoroidal, or sub-retinal route. For example, administration to the eye is by intravitreal administration. In another example, administration to the eye is by suprachoroidal administration. In a further example, administration to the eye is by sub-retinal administration. In one example, administration to the eye is by a topical administration.

[0109] As the skilled person will understand, the treatment methods disclosed herein include administration of the compositions and pharmaceutical compositions disclosed herein in a therapeutically effective amount to a subject (e.g., a human subject). The terms “effective amount” or “therapeutically effective amount,” as used herein, refer to a sufficient amount of a disclosed ASO being administered to relieve to some extent one or more of the symptoms and/or clinical indicia associated with pathological inflammation in a particular disease or health condition. In some examples, an “effective amount” for therapeutic uses is the amount of one of the foregoing agents required to provide a clinically significant decrease in disease symptoms and/or inflammatory markers or to prevent disease symptoms without undue adverse side effects. An appropriate “effective amount” in any individual case may be determined using techniques, such as a dose escalation study. The term “therapeutically effective amount” includes, for example, a prophylactically effective amount. It is understood that “an effective amount” or “a therapeutically effective amount” can vary from subject to subject, due to variation in metabolism of the compound of any age, weight, general condition of the subject, the condition being treated, the severity of the condition being treated, and the judgment of the prescribing physician. By way of example only, therapeutically effective amounts may be determined by routine experimentation, including but not limited to a dose escalation clinical trial. Where more than one therapeutic agent is used in combination, a “therapeutically effective amount” of each therapeutic agent can refer to an amount of the therapeutic agent that would be therapeutically effective when used on its own, or may refer to a reduced amount that is therapeutically effective by virtue of its combination with one or more additional therapeutic agents.

### Compositions for Increasing OPA1 Protein Levels

[0110] OPA1 mitochondrial dynamin like GTPase gene (also known as OPA1, FLJ12460, KIAA0567, MGM1, NPG and NTG; referred to herein as OPA1) is composed of 30 coding exons distributed across more than 90 kb of genomic DNA. It is located on chromosome 3q29 and encodes for a ubiquitously expressed dynamic-related GTPase, which is imported into mitochondria by an N-terminal import sequence and localizes to the inner membrane facing the intermembrane space. OPA1 contains a highly conserved functional GTPase domain shared by members of the dynamin superfamily of mechanoenzymes and regulates several important cellular processes including the stability of the mitochondrial network. In humans, OPA1 generates at least eight isoforms via differential splicing of exons 4, 4b and 5b. For the purposes of nomenclature only and not limitation the sequence of the entire human OPA1 gene sequence and known transcript maps and sequences are publicly available through the online ensembl database under record ENSG00000198836. An exemplary gene sequence of human OPA1 is set out in NCBI Reference Sequence NM_130837, or SEQ ID NO: 2489, and UniProt ID 060313, or SEQ ID NO: 2490.

[0111] The OPA1 gene contains an intron with a premature termination codon (PTC) in intron 7 (located between exons 7 and 8). In some subjects, a proportion of the OPA1 RNA transcripts from wild-type OPA1 genes retain a section of intron 7 containing this PTC; this retained intron section is called exon 7× in the transcribed RNA. The RNA transcripts that contain exon 7× (the retained intron segment containing the PTC) are subject to nonsense-mediated RNA decay. Therefore, a proportion of OPA1 RNA that is translated to mature wild-type protein, and a portion of OPA1 RNA that is degraded by RNase almost immediately due to the presence of the PTC.

[0112] As described herein, the ASOs according to any example bind to a targeted portion of human OPA1 pre-mRNA and which increase expression of OPA1 protein by promoting the exclusion of exon 7× in splicing of OPA1 in mammalian cells.

[0113] Without being bound by theory or mode of action, the ASOs that bind to targeted portions of human OPA1 pre-mRNA in mammalian cells and which result in the exclusion of NMD exon 7×, are thought to increase expression of OPA1 protein by preventing the translation of NMD exon 7×.

[0114] Also described herein, the ASOs according to any example bind to the 5′ UTR or 3′ UTR of OPA1 mRNA and increase expression of OPA1 protein.

[0115] Without being bound by theory or mode of action, the ASOs that bind to the 5′ UTR are thought to increase expression of OPA1 protein through steric inhibition of translation from upstream Open Reading Frames (uORF) start site and/or steric inhibition of secondary structure in the UTR and/or inhibiting the binding and/or activity of a decapping enzyme.

[0116] Also described herein, the ASOs according to any example bind to the 3′ UTR or 3′ UTR of OPA1 mRNA and increase expression of OPA1 protein. Without being bound by theory or mode of action, such ASOs may sterically inhibit binding of a miRNA to the 3′ UTR.

### Antisense Oligonucleotides (ASOs)

[0117] In some examples of the compositions and methods described herein, ASOs have a sequence that is completely complementary across its length to the target sequence or a sequence near complementarity (e.g., sufficient complementarity to bind the target sequence to promote exon splicing). ASOs are designed so that they bind (hybridize) to a target RNA sequence (e.g., a targeted portion of a pre-mRNA transcript) and remain hybridized under physiological conditions. Selection of suitable sequences for ASOs generally avoids, where possible, similar nucleic acid sequences in other (i.e., off-target) locations in the genome or in cellular mRNAs or miRNAs, such that the likelihood the ASO will hybridize at such sites is limited.

[0118] In some examples, ASOs “specifically hybridize” to or are “specific” to a target nucleic acid or a targeted portion of the OPA1 mRNA 5′ UTR. In some examples, ASOs “specifically hybridize” to or are “specific” to a target nucleic acid or a targeted portion of the OPA1 pre-mRNA. At a given ionic strength and pH, the Tₘ is the temperature at which 50% of a target sequence hybridizes to a complementary oligonucleotide.

[0119] ASO sequences are “complementary” to their target sequences when hybridization occurs in an antiparallel configuration between two single-stranded polynucleotides. Complementarity is quantifiable in terms of the proportion (e.g., the percentage) of bases in opposing strands that are expected to form hydrogen bonds with each other, according to generally accepted base-pairing rules. The nucleotide sequence of an ASO need not be 100% complementary to that of its target nucleic acid to hybridize. In certain examples, the nucleotide sequences of ASOs in the compositions disclosed herein can be at least 60%, at least 65%, at least 70%, at least 75%, at least 80%, at least 85%, at least 90%, at least 95%, or 100% complementary to the nucleotide sequence of the targeted portion of an RNA transcript over the length of the ASO nucleotide sequence. For example, an ASO in which 18 of 20 nucleotides of ASO sequence are complementary to a target region, and would therefore specifically hybridize, would represent 90 percent complementarity. In such an example, the remaining non-complementary nucleotides of the ASO could be clustered together or interspersed with complementary nucleotides and need not be contiguous. Complementarity of an ASO sequence to a target nucleotide sequence (expressed as “percent complementarity” to its target sequence; or “percent identity” to its reverse complement sequence) can be determined routinely using algorithms known in the art, as exemplified in the BLAST programs (basic local alignment search tools) and PowerBLAST programs (Altschul, et al., 1990, J Mol. Biol., 215:403-410; Zhang et al., 1997, Genome Res., 7:649-656).

[0120] In some examples, an ASO does not hybridize to all nucleotides in a target sequence and the nucleotide positions at which it does hybridize may be contiguous or noncontiguous. ASOs may hybridize over one or more segments of a 5′ UTR region of a mRNA or over one or more segments of intron 7 of the OPA1 pre-mRNA, such that intervening or adjacent segments are not involved in the hybridization event (e.g., a loop structure or hairpin structure may be formed).

[0121] In some examples the nucleotide sequences of ASOs described herein are complementary to a targeted portion of OPA1 mRNA 5′ UTR. For example, the ASOs are complementary to a targeted portion of the 5′ UTR of an OPA1 mRNA corresponding to SEQ ID NO:55. In some examples, the ASOs are complementary to a targeted portion of an OPA1 mRNA corresponding to SEQ ID NO:55, which encompasses the 5′ UTR. In some examples the nucleotide sequence of the ASO is at least 60%, 65%, 70%, 75%, 80%, 85%, 90%, 95%, or 100% complementary to the nucleotide sequence of the targeted portion of the OPA1 5′ UTR over the length of the ASO.

[0122] In some examples, the nucleotide sequences of ASOs that bind to targeted portions of the 5′ UTR of OPA1 mRNA comprise or consist of any one of SEQ ID NOs: 56-138.

[0123] In some examples the nucleotide sequences of ASOs described herein are complementary to a targeted portion of intron 7 of the OPA1 pre-mRNA. In some examples, the ASOs are complementary to a targeted portion within sufficient proximity to an acceptor site of exon 7× to promote exclusion of exon 7× in splicing of OPA1 mRNA e.g. the antisense oligonucleotide comprises any one of SEQ ID NOs: 2-54. In some examples, the ASOs are complementary to a targeted portion within sufficient proximity to an acceptor site of exon 7× to promote exclusion of exon 7× in splicing of OPA1 mRNA e.g. the antisense oligonucleotide comprises any one of SEQ ID NOs: 2-54 or SEQ ID NOs: 2491-2503 In some examples, the ASOs are complementary to a targeted portion within sufficient proximity to an acceptor site of exon 7× to promote exclusion of exon 7× in splicing of OPA1 mRNA e.g. the antisense oligonucleotide comprises any one of SEQ ID NOs: 2491-2503 In some examples the nucleotide sequence of the ASO is at least 60%, 65%, 70%, 75%, 80%, 85%, 90%, 95%, or 100% complementary to the nucleotide sequence of the targeted portion of intron 7 of the OPA1 pre-mRNA over the length of the ASO.

[0124] In some examples the nucleotide sequences of ASOs described herein are complementary to a targeted portion of OPA1 mRNA 3′ UTR. For example, the ASOs are complementary to a targeted portion of the 3′ UTR of an OPA1 mRNA corresponding to SEQ ID NO: 139. In some examples, the ASOs are complementary to a targeted portion of an OPA1 mRNA corresponding to SEQ ID NO: 139, which encompasses the 3′ UTR. In some examples the nucleotide sequence of the ASO is at least 60%, 65%, 70%, 75%, 80%, 85%, 90%, 95%, or 100% complementary to the nucleotide sequence of the targeted portion of the OPA1 3′ UTR over the length of the ASO.

[0125] The ASOs described herein may be of any length suitable for specific hybridization to a target sequence. In some examples, the nucleotide sequence of the ASOs consist of 8 to 50 nucleotides. For example, the ASO sequence can be 10, 11, 12, 13, 14, 15, 16, 17, 18, 19, 20, 21, 22, 23, 24, 25, 26, 27, 28, 29, 30, 31, 32, 33, 34, 35, 40, 45, or 50 nucleotides in length. In some examples, the ASOs consist of more than 50 nucleotides, but no more than 100 nucleotides in length.

[0126] In some examples, the ASO nucleotide sequence is from 8 to 50 nucleotides, 8 to 40 nucleotides, 8 to 35 nucleotides, 8 to 30 nucleotides, 8 to 25 nucleotides, 8 to 20 nucleotides, 8 to 15 nucleotides, 9 to 50 nucleotides, 9 to 40 nucleotides, 9 to 35 nucleotides, 9 to 30 nucleotides, 9 to 25 nucleotides, 9 to 20 nucleotides, 9 to 15 nucleotides, 10 to 50 nucleotides, 10 to 40 nucleotides, 10 to 35 nucleotides, 10 to 30 nucleotides, 10 to 25 nucleotides, 10 to 20 nucleotides, 10 to 15 nucleotides, 11 to 50 nucleotides, 11 to 40 nucleotides, 11 to 35 nucleotides, 11 to 30 nucleotides, 11 to 25 nucleotides, 11 to 20 nucleotides, 11 to 15 nucleotides, 12 to 50 nucleotides, 12 to 40 nucleotides, 12 to 35 nucleotides, 12 to 30 nucleotides, 12 to 25 nucleotides, 12 to 20 nucleotides, 12 to 15 nucleotides, 13 to 50 nucleotides, 13 to 40 nucleotides, 13 to 35 nucleotides, 13 to 30 nucleotides, 13 to 25 nucleotides, 13 to 20 nucleotides, 14 to 50 nucleotides, 14 to 40 nucleotides, 14 to 35 nucleotides, 14 to 30 nucleotides, 14 to 25 nucleotides, 14 to 20 nucleotides, 15 to 50 nucleotides, 15 to 40 nucleotides, 15 to 35 nucleotides, 15 to 30 nucleotides, 15 to 25 nucleotides, 15 to 20 nucleotides, 20 to 50 nucleotides, 20 to 40 nucleotides, 20 to 35 nucleotides, 20 to 30 nucleotides, 20 to 25 nucleotides, 25 to 50 nucleotides, 25 to 40 nucleotides, 25 to 35 nucleotides, or 25 to 30 nucleotides in length. In some examples, the ASOs are 17 nucleotides in length. In some preferred examples, the nucleotide sequence of the ASO nucleotide is 25 nucleotides in length.

### ASO Chemistry and Modifications

[0127] The ASOs used in the compositions described herein may comprise naturally-occurring nucleotides, nucleotide analogues, modified nucleotides, or any combination thereof. The term “naturally occurring nucleotides” includes deoxyribonucleotides and ribonucleotides. The term “modified nucleotides” includes nucleotides with modified or substituted sugar groups and/or having a modified backbone. In some examples, all the nucleotides of an ASO are modified nucleotides. Chemical modifications of ASOs or components of ASOs that are compatible with the compositions and methods described herein are known in the art as disclosed in, e.g., in U.S. Pat. Nos. 8,258,109, 5,656,612, U.S. Patent Publication No. 2012/0190728, and Roberts et al., 2020, Nature Rev. Drug Disc., 19:673-694.

[0128] One or more nucleotides of an ASO may be any naturally occurring, unmodified nucleobase such as adenine, guanine, cytosine, thymine, uracil and inosine, or any synthetic or modified nucleobase that is sufficiently similar to an unmodified nucleobase such that it is capable of hydrogen bonding with a nucleobase present on a target RNA transcript. Examples of suitable modified nucleobases include, but are not limited to, hypoxanthine, xanthine, 7-methylguanine, 5, 6-dihydrouracil, 5-methylcytosine, and 5 hydroxymethoylcytosine.

[0129] ASOs include a “backbone” structure that refers to the connection between nucleotides/monomers of the ASO. In naturally occurring oligonucleotides, the backbone comprises a 3′-5′ phosphodiester linkage connecting sugar moieties of adjacent nucleotides. Suitable types of backbone linkages for the ASOs described herein include, but are not limited to, phosphodiester, phosphorothioate, phosphorodithioate, phosphorodiamidate, phosphoroselenoate, phosphorodiselenoate, phosphoroanilothioate, phosphoraniladate, phosphoramidate, and the like. In some examples, the backbone modification is a phosphorothioate linkage. In other examples, the backbone modification is a phosphorodiamidate linkage. See, e.g., Roberts et al. supra; and Agrawal (2021), Biomedicines, 9:503. In some examples, the backbone structure of the ASO does not contain phosphorous-based linkages, but rather contains peptide bonds, for example in a peptide nucleic acid (PNA), or linking groups including carbamate, amides, and linear and cyclic hydrocarbon groups.

[0130] In some examples, the stereochemistry at each of the phosphorus internucleotide linkages of the ASO backbone is random. In other examples, the stereochemistry at each of the phosphorus internucleotide linkages of the ASO backbone is controlled and is not random. For example, U.S. Pat. No. 9,605,019 describes methods for independently selecting the handedness of chirality at each phosphorous atom in an oligonucleotide. In some examples, a composition or composition used in the methods disclosed herein comprises a pure diastereomeric ASO. In other examples, the composition comprises an ASO that has diastereomeric purity of at least about 90%, at least about 91%, at least about 92%, at least about 93%, at least about 94%, at least about 95%, at least about 96%, at least about 97%, at least about 98%, at least about 99%, about 100%, about 90% to about 100%, about 91% to about 100%, about 92% to about 100%, about 93% to about 100%, about 94% to about 100%, about 95% to about 100%, about 96% to about 100%, about 97% to about 100%, about 98% to about 100%, or about 99% to about 100%.

[0131] In some examples, the ASO has a non-random mixture of Rp and Sp configurations at its phosphorus internucleotide linkages. In some examples, an ASO used in the compositions and methods disclosed herein, comprises about 5-100% Rp, at least about 5% Rp, at least about 10% Rp, at least about 15% Rp, at least about 20% Rp, at least about 25% Rp, at least about 30% Rp, at least about 35% Rp, at least about 40% Rp, at least about 45% Rp, at least about 50% Rp, at least about 55% Rp, at least about 60% Rp, at least about 65% Rp, at least about 70% Rp, at least about 75% Rp, at least about 80% Rp, at least about 85% Rp, at least about 90% Rp, or at least about 95% Rp, with the remainder Sp, or about 100% Rp.

[0132] In some examples, the ASOs described herein contain a sugar moiety that comprises ribose or deoxyribose, or a modified sugar moiety or sugar analog, including a morpholine ring. Suitable examples of modified sugar moieties include, but are not limited to, 2′ substitutions such as 2′-O-modifications, 2′-O-methyl (2′-O-Me), 2′-O-methoxyethyl (2′MOE), 2′-O-aminoethyl, 2′F, N3′->P5′ phosphoramidate, 2′dimethylaminooxyethoxy, 2′dimethylaminoethoxyethoxy, 2′-guanidinidium, 2′-O-guanidinium ethyl, carbamate modified sugars, and bicyclic modified sugars. In some examples, the sugar moiety modification is selected from among 2′-O-Me, 2′F, and 2′MOE. In other examples, the sugar moiety modification is an extra bridge bond, such as in a locked nucleic acid (LNA). In some examples the sugar analogue contains a morpholine ring, such as phosphorodiamidate morpholino (PMO). In some examples, the sugar moiety comprises a ribofuransyl or 2′deoxyribofuransyl modification. In some examples, the sugar moiety comprises 2′4′-constrained 2′-O-methyloxyethyl (cMOE) modifications. In some examples, the sugar moiety comprises cEt 2′, 4′ constrained 2′-0 ethyl BNA modifications. In other examples, the sugar moiety comprises tricycloDNA (tcDNA) modifications. In some examples, the sugar moiety comprises ethylene nucleic acid (ENA) modifications. In some examples, the sugar moiety comprises 2′-O-(2-N-methylcarbamoylethyl) (MCE). Modifications are known in the art as exemplified in Jarver, et al., 2014, Nucleic Acid Therapeutics, 24(1): 37 47.

[0133] In some examples, each constituent nucleotide of the ASO is modified in the same way, e.g., every linkage of the backbone of the ASO comprises a phosphorothioate linkage, or each ribose sugar moiety comprises a 2-O-methyl modification. In other examples, a combination of different modifications is used, e.g., an ASO comprising a combination of phosphorodiamidate linkages and sugar moieties comprising morpholine rings (morpholinos).

[0134] In some examples, the ASO comprises one or more backbone modifications. In some examples, the ASO comprises one or more sugar moiety modification. In some examples, the ASO comprises one or more backbone modifications and one or more sugar moiety modifications. In some examples, the ASO comprises a 2′MOE modification and a phosphorothioate backbone. In some examples, the ASO comprises a peptide nucleic acid (PNA).

[0135] In some examples, the ASO comprises a phosphorodiamidate morpholino (PMO).

[0136] The skilled person in the art will appreciate that ASOs may be modified in order to achieve desired properties or activities of the ASO or reduce undesired properties or activities of the ASO. In some examples, an ASO is modified to alter one or more properties. For example, such modifications can: enhance binding affinity to a target sequence on a pre-mRNA transcript; reduce binding to any non-target sequence; reduce degradation by cellular nucleases (e.g., RNase H); improve uptake of an ASO into a cell and/or particular subcellular compartments; alter the pharmacokinetics or pharmacodynamics of the ASO; and/or modulate the half-life of the ASO in vivo.

[0137] In some examples, the ASOs comprise one or more 2′-O-(2-methoxyethyl) (MOE) phosphorothioate-modified nucleotides, which have been shown to confer significantly enhanced resistance of ASOs to nuclease degradation and increased bioavailability.

[0138] Methods for synthesis and chemical modification of ASOs, as well as synthesis of ASO conjugates is well known in the art, and such ASOs are available commercially.

[0139] In some examples, a composition (e.g., a pharmaceutical composition) provided here includes two or more ASOs with different chemistries but complementary to the same targeted portion of the OPA1 mRNA 5′ UTR. In other examples, two or more ASOs that are complementary to different targeted portions of the OPA1 mRNA 5′ UTR.

[0140] In some examples, a composition (e.g., a pharmaceutical composition) provided here includes two or more ASOs with different chemistries but complementary to the same targeted portion of intron 7 of the OPA1 pre-mRNA. In other examples, two or more ASOs that are complementary to different targeted portions of intron 7 of the OPA1 pre-mRNA.

[0141] In some examples, a composition (e.g., a pharmaceutical composition) provided here includes two or more ASOs with different chemistries but complementary to the same targeted portion of the OPA1 mRNA 3′ UTR. In other examples, two or more ASOs that are complementary to different targeted portions of the OPA1 mRNA 3′ UTR.

[0142] In some examples, the compositions disclosed herein include ASOs that are linked to a functional moiety. In some examples, the functional moiety is a delivery moiety, a targeting moiety, a detection moiety, a stabilizing moiety, or a therapeutic moiety. In some examples the functional moiety includes a delivery moiety or a targeting moiety. In some examples the functional moiety includes a stabilizing moiety. In some examples the functional moiety is a delivery moiety.

[0143] Suitable delivery moieties include, but are not limited to, lipids, peptides, carbohydrates, and antibodies.

[0144] In some examples, the delivery moiety includes a cell-penetrating peptide (CPP). Suitable examples of CPPs are described in, e.g., PCT/AU2020/051397. In some examples the amino acid sequence of the CPP comprises or consists of: RRSRTARAGRPGRNSSRPSAPRGASGGASG (SEQ ID NO: 2504). In one example, the CPP comprises the sequence RRSRTARAGRPGRNSSRPSAPRGASGGASG (SEQ ID NO: 2504), optionally wherein any amino acid other than glycine is a D amino acid. In other examples, the delivery moiety includes a receptor binding domain. In other examples, the delivery moiety includes a carbohydrate. In some examples, a carbohydrate delivery moiety is selected from among N acetylgalactosamine (GalNAc), N-Ac-Glucosamine (GluNAc), and a mannose. In one example, the carbohydrate delivery moiety is GalNac.

[0145] In other examples, the delivery moiety includes a lipid. Examples of suitable lipids as delivery moieties include, but are not limited to, cholesterol moiety, a cholesteryl moiety, and aliphatic lipids. In some examples the delivery moiety includes a fatty acid or lipid moiety. In some embodiments the fatty acid chain length is about C8 to C20. Examples of suitable fatty acid moieties and their conjugation to oligonucleotides are found in, e.g., International Patent Publication WO 2019232255 and in Prakash et al., (2019).

[0146] In further examples, the delivery moiety includes an antibody, as described in, e.g., Dugal-Tessier et al., (2021), J Clin Med., 10(4):838.

[0147] Suitable examples of stabilizing moieties include, but are not limited to, polyethylene glycol (PEG), poly(oligo(ethylene glycol) methyl ether methacrylate) (POEGMA), and Poly(2-oxazoline)s (POx).

[0148] In some examples, where an ASO is linked to a functional moiety, the functional moiety is covalently linked to the ASO. In other examples, the functional moiety is non-covalently linked to the ASO.

[0149] Functional moieties can be linked to one or more of any nucleotides in an ASO at any of several positions on the sugar, base or phosphate group, as understood in the art and described in the literature, e.g., using a linker. Linkers can include a bivalent or trivalent branched linker. In some examples, the functional moiety is linked to the 5′ end of the ASO. In other examples, the functional moiety is linked to the 3′ end of the ASO. In further examples, the functional moiety is linked to the 5′ end and the 3′ of the ASO.

[0150] In some examples compositions comprising any of the ASOs disclosed herein also include a delivery nanocarrier complexed with ASO. In some examples, a delivery nanocarrier is selected from among lipoplexes, liposomes, exosomes, inorganic nanoparticles, and DNA nanostructures. In other examples the delivery nanocarrier includes a lipid nanoparticle encapsulating the ASO. Various delivery ASO-nanocarrier complex formats are known in the art, as reviewed in, e.g., Roberts et al., supra.

### Pharmaceutical Compositions

[0151] Also provided herein are pharmaceutical compositions comprising any of the foregoing ASOs, and modified messenger RNAs (mmRNAs) disclosed herein, and formulated with at least a pharmaceutically acceptable excipient, including a carrier, filler, preservative, adjuvant, solubilizer and/or diluent.

[0152] Pharmaceutical compositions containing any of the ASOs compositions described herein, for use in the methods disclosed herein, can be prepared according to conventional techniques well known in the pharmaceutical industry and described in the published literature. In some examples, a pharmaceutical composition for treating a subject comprises a therapeutically effective amount of any ASO disclosed herein.

[0153] Pharmaceutically acceptable salts are suitable for use in contact with the tissues of humans and lower animals without undue toxicity, irritation, allergic response, etc., and are commensurate with a reasonable benefit/risk ratio. Examples of pharmaceutically acceptable, nontoxic acid addition salts are salts of an amino group formed with inorganic acids such as hydrochloric acid, hydrobromic acid, phosphoric acid, sulfuric acid and perchloric acid or with organic acids such as acetic acid, oxalic acid, maleic acid, tartaric acid, citric acid, succinic acid or malonic acid. Other pharmaceutically acceptable salts include adipate, alginate, ascorbate, aspartate, benzenesulfonate, benzoate, bisulfate, borate, butyrate, camphorate, camphorsulfonate, citrate, cyclopentanepropionate, digluconate, dodecylsulfate, ethanesulfonate, formate, fumarate, glucoheptonate, glycerophosphate, gluconate, hemisulfate, heptanoate, hexanoate, hydroiodide, 2-hydroxy-ethanesulfonate, lactobionate, lactate, laurate, lauryl sulfate, malate, maleate, malonate, methanesulfonate, 2-naphthalenesulfonate, nicotinate, nitrate, oleate, oxalate, palmitate, pamoate, pectinate, persulfate, 3-phenylpropionate, phosphate, picrate, pivalate, propionate, stearate, succinate, sulfate, tartrate, thiocyanate, p-toluenesulfonate, undecanoate, valerate salts, and the like. Representative alkali or alkaline earth metal salts include sodium, lithium, potassium, calcium, magnesium, and the like. Further pharmaceutically acceptable salts include, when appropriate, nontoxic ammonium, quaternary ammonium, and amine cations formed using counterions such as halide, hydroxide, carboxylate, sulfate, phosphate, nitrate, lower alkyl sulfonate and aryl sulfonate.

[0154] Exemplary salts useful in a composition of the present disclosure include calcium chloride, magnesium chloride or sodium chloride.

[0155] In one example, a composition comprises a buffer. Exemplary buffers useful in a composition of the present disclosure include sodium phosphate.

[0156] In some examples, pharmaceutical compositions are formulated into any of a number of possible dosage forms including, but not limited to, ocular emulsions, topical ointments, solutions for intravitreal injection, intravenous administration, intrathecal administration, intracisterna magna administration, tablets, capsules, gel capsules, liquid syrups, and soft gels. In some examples, the compositions are formulated as suspensions in aqueous, non-aqueous or mixed media. Aqueous suspensions may further contain substances that increase the viscosity of the suspension including, for example, sodium carboxymethylcellulose, sorbitol and/or dextran. The suspension may also contain stabilizers. In some examples, a pharmaceutical formulation disclosed herein is provided in a form including, but not limited to, a solution, emulsion, microemulsion, foam or liposome-containing formulation (e.g., cationic or noncationic liposomes).

[0157] In some examples, pharmaceutical formulations comprising any of the ASOs described herein may comprise one or more penetration enhancers, carriers, excipients or other active or inactive ingredients as appropriate and known to the skilled person. In some examples, where a pharmaceutical composition includes liposomes, such liposomes can also include sterically stabilized liposomes, e.g., liposomes comprising one or more specialized lipids. These specialized lipids result in liposomes with enhanced circulation lifetimes. In some examples, a sterically stabilized liposome comprises one or more glycolipids or is derivatized with one or more hydrophilic polymers, such as PEG moiety. In some examples, a surfactant is included in the pharmaceutical formulation.

[0158] In some examples, a pharmaceutical composition also includes a penetration enhancer to enhance the delivery of ASOs, e.g., to aid diffusion across cell membranes and/or enhance the permeability of a lipophilic drug. In some examples, the penetration enhancers include a surfactant, a fatty acid, a bile salt, or a chelating agent.

[0159] In some examples, a pharmaceutical composition comprises a dose of ASOs ranging from about 0.01 mg/kg to 20 mg/kg, e.g., 0.05 mg/kg, 0.1 mg/kg, 0.2 mg/kg, 0.5 mg/kg, 1 mg/kg, 3 mg/kg, 5 mg/kg, 8 mg/kg, 10 mg/kg, 15 mg/kg, or another dose ranging from about 0.01 mg/kg to 20 mg/kg.

[0160] In some examples, a pharmaceutical composition comprises multiple ASOs. In some examples, a pharmaceutical composition comprises, in addition to ASOs, another drug or therapeutic agent suitable for treatment of a subject suffering from glaucoma.

### Combination Therapies

[0161] The pharmaceutical compositions comprising any of the ASOs disclosed herein, can also be used in combination with other agents of therapeutic value in the treatment of glaucoma. In general, other agents do not necessarily have to be administered in the same pharmaceutical composition, and may, because of different physical and chemical characteristics, be administered by different routes. The determination of the mode of administration and the advisability of administration, where possible, in the same pharmaceutical composition, is well within the knowledge of the skilled clinician. The initial administration can be made according to established protocols known in the art, and then, based upon the observed effects, the dosage, modes of administration and times of administration can be modified by the skilled clinician.

[0162] Compositions and pharmaceutical compositions comprising ASOs and an additional therapeutic agent may be administered concurrently (e.g., simultaneously, essentially simultaneously or within the same treatment protocol) or sequentially, depending upon the stage and progression of the glaucoma to be treated, the condition of the patient, and the choice of specific therapeutic agents used. The determination of the order of administration, and the number of repetitions of administration of each therapeutic agent during a treatment protocol, is well within the knowledge of the skilled physician after evaluation of the glaucoma being treated and the condition of the patient.

[0163] It is known to those of skill in the art that therapeutically-effective dosages can vary when the drugs are used in treatment combinations. Methods for experimentally determining therapeutically-effective dosages of drugs and other agents for use in combination treatment regimens are described in the literature. For example, the use of metronomic dosing, i.e., providing more frequent, lower doses in order to minimize toxic side effects, has been described extensively in the literature. Combination treatment further includes periodic treatments that start and stop at various times to assist with the clinical management of the patient.

[0164] For combination therapies, dosages of co-administered therapeutic agents will of course vary depending on the type of co-agents employed, ASO, and the disease stage of the patient to be treated.

[0165] Pharmaceutical compositions comprising ASOs and an additional therapeutic agent which make up a combination therapy disclosed herein may be a combined dosage form or in separate dosage forms intended for substantially simultaneous administration. The pharmaceutical compositions that make up the combination therapy may also be administered sequentially, with either therapeutic agent being administered by a regimen calling for two-step administration. The two-step administration regimen may call for sequential administration of the active agents or spaced-apart administration of the separate active agents. The time period between the multiple administration steps may range from, a few minutes to several hours, depending upon the properties of each pharmaceutical agent, such as potency, solubility, bioavailability, plasma half-life and kinetic profile of the pharmaceutical agent. Circadian variation of various physiological parameters may also be evaluated to determine the optimal dose interval.

[0166] Examples of suitable therapeutic agents for co-administration with a composition or a pharmaceutical composition disclosed herein include, but are not limited to, prostaglandins (e.g., latanoprost (Xalatan®), travoprost (Travatan Z®), tafluprost (Zioptan®), bimatoprost (Lumigan®) and latanoprostene bunod (Vyzulta®)), beta blockers (e.g., timolol (Betimol®, Istalol®, Timoptic®) and betaxolol (Betoptic®)), alpha-adrenergic agonists (e.g., apraclonidine (Iopidine®) and brimonidine (Alphagan P, Qoliana®)), carbonic anhydrase inhibitors (e.g., dorzolamide (Trusopt®) and brinzolamide (Azopt®)), a rho kinase inhibitor (e.g., netarsudil (Rhopressa®)) and miotic or cholinergic agents (e.g., pilocarpine (Isopto Carpine®)).

[0167] The present disclosure is not to be limited by the following non-limiting examples.

### EXAMPLES

### Example 1: ASO Design to Target Exclusion of an OPA1 NMD Exon 7×

[0168] The ASO target region of OPA1 intron 7 and exon 7× is shown in FIGS. 1A and C. ASOs with 24-25 nucleotides in length (Table 1, SEQ ID NOs: 2-9) are designed to target the intronic splice enhancer motifs (prediction using SpliceAid online tool) in intron 7 to mediate exclusion of exon 7× and generate productive OPA1 transcripts. The identified ASO sequences are synthesized as PMOs and/or 2′MOE chemistry) and nucleofected into HEK293 cells or ADOA patient fibroblasts carrying the OPA1 mutation (c.2708_2711delTTAG) using the NEON® electroporation system (ThermoFisher) at 25 μM and 50 μM and the nucleofected cells are cultured for 48 hr. Total RNA was extracted using the MagMAX™—96 Total RNA Isolation kit and the level of OPA1 transcript is assessed by digital droplet PCR (Qiagen; probe catalogue number: dHsaCPE5043545). OPA1 transcript expression is normalized to GAPDH, RPL27 and SCL25A3 transcript levels (Qiagen; probe catalogue number: dHsaCPE5031596, dHsaCPE5036407, dHsaCPE5032926 respectively). The result of ASO screening is shown in FIG. 2. PMOs that show induced OPA1 mRNA levels were further validated for the ability to increase OPA1 protein upregulation using a western blot assay as shown in FIG. 3. Further refinement of ASO sequences (FIGS. 4, Table 1; SEQ ID NOs: 10-31 and Table 2; SEQ ID NOs: 32-54) is performed to reduce or extend ASO length and micro-walk or engineered mismatch oligos and re-validated by ddPCR and protein assays. The efficacy of refined ASOs in inducing OPA1 upregulation in shown in FIGS. 5 and 6.

### Example 2 ASO Design to Target the 5′ UTR of an OPA1 Transcript

[0169] ASOs with 18-25 nucleotides in length (Table 3, SEQ ID NOs: 56-116) are designed to sterically inhibit a uORF or reduce the complexity of RNA secondary structure in the 5′ UTR. The secondary structure of RNA is predicted using RNAfold online tool. The identified ASO sequences are synthesized as PMO and or 2′MOE chemistry) and nucleofected into HEK293 cells or ADOA patient fibroblasts carrying OPA1 mutation (c.2708_2711delTTAG) using the NEON® electroporation system (ThermoFisher) at 25 μM and 50 μM and the nucleofected cells were cultured for 48 hr. Total protein is harvested from the transfected cells using the CytoBuster protein extraction reagent (Merck Millipore) following the manufacturer's instruction and assessed by Western blot assay using rabbit anti-OPA1 monoclonal antibody (Cell Signaling, catalogue number 67589) at a dilution of 1:250 in 5% BSA in TBST buffer followed by goat anti-rabbit IgG H&L antibody (Abcam, catalogue number ab216773, IRDye® 800CW). Beta-actin serves as loading control and is detected using monoclonal mouse anti-beta actin antibody (Sigma-Aldrich, catalogue number A5441) followed by goat anti-mouse IgG H&L antibody (Abcam, catalogue number ab216776, IRDye® 680RD). ASO sequences are further refined by micro-walk or engineered mismatch oligos and/or extended up to 30 nucleotides (Table 3; SEQ ID NOs: 117-138). ASOs was subsequently re-validated using a western blot assay and the results is shown in FIG. 7.

### Example 3 ASO Design to Target the 3′ UTR to Increase OPA1 Expression Levels

[0170] An ASO sequence “micro-walk” of 25-mers (Table 4; SEQ ID NOs: 140-1312) or 17-mers (Table 5; SEQ ID NOs: 1313-2488) in 3 bp increments of distance is performed over the sequences of the 3′ UTR of the ENST00000361510 transcript to mediate improvement in RNA stability. ASOs are screened to guide the ASO selection for OPA1 expression upregulation using ddPCR and western blot assays described in Examples 1 and 2.

### Example 4 PPMO-Mediated OPA1 Upregulation to Improve Mitochondrial ATP Production

[0171] PMO OPA1 H1A(+10+32)1 mm10C>T (SEQ ID NO: 112) was conjugated with CPP for enhanced delivery into cells. The CPP-PMO (or PPMO) was tested for the ability to improve OPA1 protein upregulation in fibroblasts derived from ADOA patients with distinct OPA1 mutations. PPMO was incubated to patient fibroblasts and the efficacy of PPMO-induced OPA1 upregulation was assessed using a western blot assay. Total protein was harvested from the transfected cells using RIPA buffer (ThermoFisher) following the manufacturer's instruction and assessed by western blot assay using rabbit anti-OPA1 monoclonal antibody (Cell Signaling Technology, catalogue number 67589) at a dilution of 1:250 in 5% BSA in TBST buffer followed by goat anti-rabbit IgG H&L antibody (Abcam, catalogue number ab216773, IRDye® 800CW). HPRT1 served as the loading control and was detected using HPRT1 Polyclonal antibody (ProteinTech, catalogue number 15059-1-AP). Expression levels of OPA1 protein were compared between no PPMO-transfected cells (UT) and OPA1 PPMO-incubated cells. FIG. 8 shows the PPMO exhibited upregulation of OPA1 protein expression compared to untreated patient fibroblasts (n=3 biological replicates). In addition, PPMO-treated cells were evaluated for the improvement of mitochondrial function using a CellTiter-Glo® assay to assess ATP levels. PPMO-treated cells were culture in a glucose starvation condition supplemented with 5 mM pyruvate (cat #11360070, ThermoFisher) to continuously supply a substrate for mitochondrial respiratory chain reaction while glycolysis was inhibited using 2.5 mM D-deoxy glucose (catalogue number D8375, Sigma-Aldrich). An ATP standard curve was analysed using 14.7-10,000 nM ATP (catalogue number R0441, ThermoFisher). Results in FIG. 9 show improvement in mitochondrial ATP production in patient fibroblasts treated with the PPMO (SEQ ID NO: 112) targeting the 5′ UTR of OPA1 transcript.

### Example 5 PPMO Treatment Induces Total OPA1 Protein in RGC Enriched Culture Derived from an ADOA Patient

[0172] PPMO OPA1 H1A(+10+32)1 mm10C>T (SEQ ID NO: 112) was incubated to iPSC-RGCs derived from an ADOA patient carrying the OPA1 mutation (c.985-1G>A) for 120 hr in triplicates. Total protein was harvested from the transfected cells using the CytoBuster protein extraction reagent (Merck Millipore) following the manufacturer's instruction and assessed by western blot assay using rabbit anti-OPA1 monoclonal antibody (Cell Signaling Technology, catalogue number 67589) at a dilution of 1:250 in 5% BSA in TBST buffer followed by goat anti-rabbit IgG H&L antibody (Abcam, catalogue number ab216773, IRDye® 800CW). Beta-actin served as loading control and was detected using monoclonal mouse anti-beta actin antibody (Sigma-Aldrich, catalogue number A5441) followed by goat anti-mouse IgG H&L antibody (Abcam, catalogue number ab216776, IRDye® 680RD). FIG. 10 shows the PPMO mediated upregulation of total OPA1 protein by up to 1.3-fold at 10 μM as compared to untreated patient fibroblasts. Student's t test was used for statistical analysis.

### Sequences

[0173] SEQ ID NO: 1: OPA1 intron 7 (lowercase) and exon7× (uppercase) cDNA sequence (GRCh38/hg38: chr3 193626203-193628616)

gtgatggatggtttaagggggctaccgatacattcacactaatcagccatttctgccaagatcatgtcacctcaa
tctgttcatggactccaaatacaagaaattaatttgacaaagtgaaaatataaaagatgcatcatataaatatgt
aacttttctggagtgggtagtataggtaaagccaaaagaaacaaattcaagcagaggaattttggtttctgaaaa
ttaggttgtctgtagggtccctgtatttatacttagaacaaaattaggaatttctgtttatgtggtccagttatt
gagtcaccctaagtttgtaggcatcttacctacctacttgctccccaagtttttatttctaaaatgaaaagcatt
gctgtagatgaccagtttacactaaagaataacatttatttatttgttttagctaaagtatatggacagggaaca
ttcatattcttgtagaagaaaattattttgacttttgggcaaaagcatgtagttcttatacactttgacaaactc
attgcgtacatttttcacattaatcaaagtcagcacaaataaattttcaccttggaccacggagggtttgaacac
tggaaatttgatataattctggttgctaaagaacaagttctaataaaagcttaagtgtataccaatatgtggctg
ttggtgcaatcagcaggtccgtaaaaatatgattttaatggttaggtaatcccacaacggagatcccaaagttca
tgtttggaagagacttttgggtcaaagtgaaatcagtgtaatgaatttaaaattatactctgagatcttgaaatc
agctaattatgttacatcttattagctcagaaaagttttgaagttatatacaaatgctagtcaggaaaaaagatt
cagtcatgtaattcttgtacattctactatttaaatcaaccaatattatagattatgatttagtgcagtaattct
gctggctaaccttatctcatttggtggtggttagtacttcagagtactcaccatagtttcatttatgttttcagc
atcacttcctggtttttctcaattccatggctgtggaatcaattcatatgtatatttagcttcggtgagcaaaaa
catagctagaaaaagaaaagaagtgagtttcctacctggttaaattaaagtcgatgtgttaagccaaggaggact
tcttttgaatggtactttaacaatccctgttctgtatactgtgaatatatcatttaaatagcctaataaattgga
tgcttaggctgagccacctatactttagttttgttatggaaagaagggagaggagcaagtatgttcttatatgtt
acttagaaataagaatgtagctgtagttacacattgttcttaagtttttttcgtaagacaacttgaaatgagtcc
cataggcctgctatttaacattctaagatatgacttaaggttaatgatgagcttttgaatctgacaattcaagag
atatccataatgaatactgattcattttctacattgctgaaagctaatgttcattttaagcctactttagtagcc
tttatttgggcttagagatgttattcctctttctgatatttattgggttatctgtttaacccttttatatctccc
tttcccgatttgtaaattagagactggcaagactttttaccctgagtagagcaccaaacatggcttgtttctgcc
cacactgtagttaccttgaggggaagtaaatgggactttaaaagcaatttatgctcttttatagtgaaattatcc
ctcttactatcccgaaagactgttaccttacaatatcctccactcctttccccctgtagttactatagagatgac
ttttcggttcttcactgccataatgatcaaaatcctaattcatgagatttttatcattccaggcatgtgaggttt
acttgatgcataaaaccgcaagtactttttgttgttttttaattgttttttctctcttatcttcttgaaagtcta
agtagatcatcatttttgatgtcttattagtagcaactaataaattttccctgtatcttctcagcaaaagaactc
aagcagagacagaagattagaactaccattggtagttttgcttcctatggatatgttcacatacatagaaatttt
tacaatgacctttttatatatgtatttcagaatttcagaatggcctcaatgccttaataggaagaaatacttgaa
atttttaaattagggcttggttttgtgaggagctagtaaaggtttttctctttcagCTTTAGCTTGTTTCTGCGG
AGGATTCCGCTCTTTCTCCATCAGTTTCATAGCCCTGGAATTGTAGAAAAGCTCTGGTTTCAAGACCATTGATAT
CCATTTCTGTCAGG

TABLE 1
List of antisense oligonucleotide sequences targeting
removal of NMD exon 7X of an OPA1 transcript

| SEQ | | |
|---|---|---|
| ID | ASO Coordinates | Sequence 5′>3′ |
| 2 | hOPA1_Ex7xA(−99 − 76) | CTGAAATACATATATAAAAAGGTC |
| 3 | hOPA1_Ex7xA(−99 − 76) | CTGAAATACATATATAAGAAGGTC |
| | 1mm | |
| 4 | hOPA1_Ex7xA(−100 − 76) | CTGAAATACATATATAAGAAGGTC |
| | 1mmA-G | A |
| 5 | hOPA1_Ex7xA(−106 − 82) | TACATATATAAGAAGGTCATTGTA |
| | 1mmA-G | A |
| 6 | hOPA1_Ex7xA(−117 − 93) | AAAGGTCATTGTAAGAATTTCTATG |
| | 1mmA-G | |
| 7 | hOPA1_Ex7xA(−127 − 103) | GTAAAAATTTCTATGTATGTGAACA |
| 8 | hOPA1_Ex7xA(−139 − 115) | TCTATGTATGTGAACATATCCATAG |
| 9 | hOPA1_Ex7xA(−187 − 163) | AATCTTCTGTCTCTGCTTGAGTTCT |
| 10 | hOPA1_Ex7xA(−113 − 84) | TGAGGCCATTCTGAAATTCTGAAAT |
| | | ACATA |
| 11 | hOPA1_Ex7xA(−113 − 84) | TGAGGCCATTCTGGAATTCTGAAAT |
| | 14mmA>G | ACATA |
| 12 | hOPA1_Ex7xA(−112 − 83) | TTGAGGCCATTCTGAAATTCTGAAA |
| | | TACAT |
| 13 | hOPA1_Ex7xA(−111 − 82) | ATTGAGGCCATTCTGAAATTCTGAA |
| | | ATACA |
| 14 | hOPA1_Ex7xA(−110 − 81) | CATTGAGGCCATTCTGAAATTCTGA |
| | | AATAC |
| 15 | hOPA1_Ex7xA(−110 − 81) | CATTGAGGCCATTCTGAAATTCTGG |
| | 25mmA>G | AATAC |
| 16 | hOPA1_Ex7xA(−109 − 80) | GCATTGAGGCCATTCTGAAATTCTG |
| | | AAATA |
| 17 | hOPA1_Ex7xA(−108 − 79) | GGCATTGAGGCCATTCTGAAATTCT |
| | | GAAAT |
| 18 | hOPA1_Ex7xA(−107 − 78) | AGGCATTGAGGCCATTCTGAAATTC |
| | | TGAAA |
| 19 | hOPA1_Ex7xA(−106 − 77) | AAGGCATTGAGGCCATTCTGAAATT |
| | | CTGAA |
| 20 | hOPA1_Ex7xA(−105 − 76) | TAAGGCATTGAGGCCATTCTGAAAT |
| | | TCTGA |
| 21 | hOPA1_Ex7xA(−104 − 76) | TAAGGCATTGAGGCCATTCTGAAAT |
| | | TCTG |
| 22 | hOPA1_Ex7xA(−103 − 76) | TAAGGCATTGAGGCCATTCTGAAAT |
| | | TCT |
| 23 | hOPA1_Ex7xA(−102 − 76) | TAAGGCATTGAGGCCATTCTGAAAT |
| | | TC |
| 24 | hOPA1_Ex7xA(−101 − 76) | TAAGGCATTGAGGCCATTCTGAAAT |
| | | T |
| 25 | hOPA1_Ex7xA(−100 − 76) | TAAGGCATTGAGGCCATTCTGGAA |
| | 22mmA>G | T |
| 26 | hOPA1_Ex7xA(−104 − 75) | TTAAGGCATTGAGGCCATTCTGAAA |
| | | TTCTG |
| 27 | hOPA1_Ex7xA(−103 − 74) | ATTAAGGCATTGAGGCCATTCTGAA |
| | | ATTCT |
| 28 | hOPA1_Ex7xA(−102 − 73) | TATTAAGGCATTGAGGCCATTCTGA |
| | | AATTC |
| 29 | hOPA1_Ex7xA(−101 − 72) | CTATTAAGGCATTGAGGCCATTCTG |
| | | AAATT |
| 30 | hOPA1_Ex7xA(−100 − 71) | CCTATTAAGGCATTGAGGCCATTCT |
| | | GAAAT |
| 31 | hOPA1_Ex7xA(−99 − 70) | TCCTATTAAGGCATTGAGGCCATTC |
| | | TGAAA |

TABLE 2
List of antisense oligonucleotide micro-walked sequences
with 17 nucleotides targeting intron 7 of an OPA1 transcript.

| SEQ | | |
|---|---|---|
| ID | ASO Coordinates | Sequence 5′>3′ |
| 32 | OPA1 H7XA(−215 − 199) | CTCTGCTTGAGTTCTTT |
| 33 | OPA1 H7XA(−212 − 196) | TGTCTCTGCTTGAGTTC |
| 34 | OPA1 H7XA(−209 − 193) | TTCTGTCTCTGCTTGAG |
| 35 | OPA1 H7XA(−206 − 190) | ATCTTCTGTCTCTGCTT |
| 36 | OPA1 H7XA(−203 − 187) | CTAATCTTCTGTCTCTG |
| 37 | OPA1 H7XA(−164 − 148) | TGAACATATCCATAGGA |
| 38 | OPA1 H7XA(−161 − 145) | ATGTGAACATATCCATA |
| 39 | OPA1 H7XA(−158 − 142) | TGTATGTGAACATATCC |
| 40 | OPA1 H7XA(−155 − 139) | CTATGTATGTGAACATA |
| 41 | OPA1 H7XA(−152 − 136) | TTTCTATGTATGTGAAC |
| 42 | OPA1 H7XA(−149 − 133) | AAATTTCTATGTATGTG |
| 43 | OPA1 H7XA(−146 − 130) | TAAAAATTTCTATGTAT |
| 44 | OPA1 H7XA(−143 − 127) | TTGTAAAAATTTCTATG |
| 45 | OPA1 H7XA(−140 − 124) | TCATTGTAAAAATTTCT |
| 46 | OPA1 H7XA(−137 − 121) | AGGTCATTGTAAAAATT |
| 47 | OPA1 H7XA(−134 − 118) | AAAAGGTCATTGTAAAA |
| 48 | OPA1 H7XA(−131 − 115) | ATAAAAAGGTCATTGTA |
| 49 | OPA1 H7XA(−128 − 112) | TATATAAAAAGGTCATT |
| 50 | OPA1 H7XA(−125 − 109) | ACATATATAAAAAGGTC |
| 51 | OPA1 H7XA(−122 − 106) | AATACATATATAAAAAG |
| 52 | OPA1 H7XA(−119 − 103) | TGAAATACATATATAAA |
| 53 | OPA1 H7XA(−116 − 100) | TTCTGAAATACATATAT |
| 54 | OPA1 H7XA(−113 − 97) | AAATTCTGAAATACATA |

SEQ ID: 55: cDNA sequence of the 5′ UTR of an OPA transcript (GRCh38/hg38: chr3 193593064-193593380).
GTCCGTTCCCGACGCACTGTGCGCATGCGCTGGTCCTCCGCGGACCGTTCGTGCTGCCCGCCTAGAAAGGGTGAAGTGGTTGTTTCCGTGACGGACTGAGTACGGGTGCCTGTCAGGCTCTTGCGGAAGTCCATGCGCCATTGGGAGGGCCTCGGCCGCGGCTCTGTGCCCTTGCTGCTGAGGGCCACTTCCTGGGTCATTCCTGGACCGGGAGCCGGGCTGGGGCTCACACGGGGGCTCCCGCGTGGCCGTCTCGGCGCCTGCGTGACCTCCCCGCCGGCGGG

TABLE 3
List of antisense oligonucleotide sequences targeting
the 5′ UTR of an OPA1 transcript.

| SEQ | | |
|---|---|---|
| ID | ASO Coordinates | Sequence 5′>3′ |
| 56 | OPA1_H1A(−39 − 17) | ACCAGCGCATGCGCACAGTGCGT |
| 57 | OPA1_H1A(−35 − 14) | AGGACCAGCGCATGCGCACAGT |
| 58 | OPA1_H1A(−26 − 6)1mm | GTCCGCTGAGGACCAGCGCAT |
| 59 | OPA1_H1A(−3 + 18) | TTTCTAGGGGGCAGCACGAA |
| 60 | OPA1_H1A(+10 + 32) | CAACCACTTCACCCTTTCTAGGC |
| 61 | OPA1_H1A(+13 + 31) | AACCACTTCACCCTTTCTA |
| 62 | OPA1_H1A(+33 + 57) | ACCCGTACTCAGTCCGTCACGGAAA |
| 63 | OPA1_H1A(+33 + 54) | CGTACTCAGTCCGTCACGGAAA |
| 64 | OPA1_H1A(+56 + 80) | ACTTCCGCAAGAGCCTGACAGGCAC |
| 65 | hOPA1_H1A(+63 + 82) | GGACTTCCGCAAGAGCCTGA |
| 66 | OPA1_H1A(+68 + 92) | CAATGGCGCATGGACTTCCGCAAGA |
| 67 | OPA1_H1A(+78 + 98) | CTCCCAATGGCGCATGGACT |
| 68 | OPA1_H1A(+128 + 146)1mm | CCCAGGAAGTGGTCCTCAG |
| 69 | OPA1_H1A(+148 + 166) | GGCTCCCGGTCCAGGAATG |
| 70 | OPA1_H1A(+200 + 218)2mm | TCACGCAGGTGCTGAGACG |
| 71 | hOPA1_H1A(−30 − 9) | CGTGGAGGACCAGTGCATGCGC |
| | 2mmT(C>T) | |
| 72 | hOPA1_H1A(−22 − 2) | AACGGTCCGCGGAGGACCAGC |
| 73 | hOPA1_H1A(−18 + 4) | GCACGAACGGTCCGCGGAGGAC |
| 74 | hOPA1_H1A(−14 + 8) | GGCAGTACGAACGGTCTGCGGA |
| | 2mmT(C>T) | |
| 75 | hOPA1_H1A(−10 + 12) | GGTGGGCAGCACGAATGGTCCG |
| | 2mmT(C>T) | |
| 76 | hOPA1_H1A(−6 + 16) | TCTAGGCGGGCAGCACGAACGG |
| 77 | hOPA1_H1A(−2 + 21) | CCTTTCTAGGCGGGCAGCACGA |
| 78 | hOPA1_H1A(+2 + 25) | TCACCCTTTCTAGGCGGGCAGC |
| 79 | hOPA1_H1A(+7 + 31) | AACCACTTCACCCTTTCTAGGCGGG |
| 80 | hOPA1_H1A(+12 + 36) | GAAACAACCACTTCACCCTTTCTAG |
| 81 | hOPA1_H1A(+17 + 41) | TCACGGAAACAACCACTTCACCCTT |
| 82 | hOPA1_H1A(+22 + 46) | GTCCGTCACGGAAACAACCACTTCA |
| 83 | hOPA1_H1A(+27 + 51) | ACTCAGTCCGTCACGGAAACAACCA |
| 84 | hOPA1_H1A(+38 + 62) | CAGGCACCCGTACTCAGTCCGTCAC |
| 85 | hOPA1_H1A(+44 + 67) | CCTGACAGGCACCCGTACTCAGTCC |
| 86 | hOPA1_H1A(+50 + 71) | GAGCCTGACAGGCACCCGTACTC |
| 87 | hOPA1_H1A(+56 + 75) | GCAAGAGCCTGACAGGCACCCG |
| 88 | hOPA1_H1A(+120 + 141) | AAGTGGCCCTCAGCAGCAAGGG |
| 89 | hOPA1_H1A(+125 + 148)2mmT | ACCTAGGAAGTGGTCCTCAGCAGC |
| | (C>T) | |
| 90 | hOPA1_H1A(+129 + 154) | GGAATGACCCAGGAAGTGGCCCTCA |
| 91 | hOPA1_H1A(+134 + 159) | GTCCAGGAATGACCCAGGAAGTGGC |
| 92 | hOPA1_H1A(+42 + 66) | CTGACAGGCACCCGTACTCAGTCCG |
| 93 | hOPA1_H1A(+44 + 68) | GCCTGACAGGCACCCGTACTCAGTC |
| 94 | hOPA1_H1A(+45 + 69) | AGCCTGACAGGCACCCGTACTCAGT |
| 95 | hOPA1_H1A(+46 + 70) | GAGCCTGACAGGCACCCGTACTCAG |
| 96 | hOPA1_H1A(+47 + 71) | AGAGCCTGACAGGCACCCGTACTCA |
| 97 | hOPA1_H1A(+48 + 72) | AAGAGCCTGACAGGCACCCGTACTC |
| 98 | hOPA1_H1A(+49 + 73) | CAAGAGCCTGACAGGCACCCGTACT |
| 99 | hOPA1_H1A(+50 + 74) | GCAAGAGCCTGACAGGCACCCGTAC |
| 100 | hOPA1_H1A(+42 + 66)2mmC>T | CTGACAGGCATTCGTACTCAGTCCG |
| 101 | hOPA1_H1A(+44 + 68)2mmC>T | GCCTGACAGGCACTTGTACTCAGTC |
| 102 | hOPA1_H1A(+45 + 69)2mmC>T | AGCCTGACAGGCATTCGTACTCAGT |
| 103 | hOPA1_H1A(+46 + 70)2mmC>T | GAGCTTGACAGGCACCTGTACTCAG |
| 104 | hOPA1_H1A(+47 + 71)2mmC>T | AGAGCTTGACAGGCACTCGTACTCA |
| 105 | hOPA1_H1A(+48 + 72)2mmC>T | AAGAGCTTGACAGGCACTCGTACTC |
| 106 | hOPA1_H1A(+49 + 73)2mmC>T | CAAGAGCTTGACAGGCATCCGTACT |
| 107 | hOPA1_H1A(+50 + 74)2mmC>T | GCAAGAGCTTGACAGGCATCCGTAC |
| 108 | OPA1_H1A(+10 + 34) | AACAACCACTTCACCCTTTCTAGGC |
| 109 | OPA1_H1A(+10 + 33) | ACAACCACTTCACCCTTTCTAGGC |
| 110 | OPA1 H1A(+9 + 33) | ACAACCACTTCACCCTTTCTAGGCG |
| 111 | OPA1_H1A(+11 + 35) | AAACAACCACTTCACCCTTTCTAGG |
| 112 | OPA1 H1A(+10 + 32) | CAACCACTTTACCCTTTCTAGGC |
| | 1mm10C>T | |
| 113 | OPA1 H1A(+10 + 32) | CAACCACTTCATCCTTTCTAGGC |
| | 1mm12C>T | |
| 114 | hOPA1_H1A(+63 + 80) | ACTTCCGCAAGAGCCTGA |
| 115 | hOPA1_H1A(+79 + 96) | TCCCAATGGCGCATGGAC |
| 116 | hOPA1_H1A(−50 − 21) | GCGCATGCGCACAGTGCGTCGGGA |
| | | ACGGAC |
| 117 | hOPA1_H1A(−49 − 20) | AGCGCATGCGCACAGTGCGTCGGG |
| | | AACGGA |
| 118 | hOPA1_H1A(−48 − 19) | CAGCGCATGCGCACAGTGCGTCGG |
| | | GAACGG |
| 119 | hOPA1_H1A(−47 − 18) | CCAGCGCATGCGCACAGTGCGTCG |
| | | GGAACG |
| 120 | hOPA1_H1A(−46 − 17) | ACCAGCGCATGCGCACAGTGCGTC |
| | | GGGAAC |
| 121 | hOPA1_H1A(−45 − 16) | GACCAGCGCATGCGCACAGTGCGT |
| | | CGGGAA |
| 122 | hOPA1_H1A(−44 − 15) | GGACCAGCGCATGCGCACAGTGCG |
| | | TCGGGA |
| 123 | hOPA1_H1A(−43 − 14) | AGGACCAGCGCATGCGCACAGTGC |
| | | GTCGGG |
| 124 | hOPA1_H1A(−42 − 13) | GAGGACCAGCGCATGCGCACAGTG |
| | | CGTCGG |
| 125 | hOPA1_H1A(−41 − 12) | GGAGGACCAGCGCATGCGCACAGT |
| | | GCGTCG |
| 126 | hOPA1_H1A(−40 − 11) | CGGAGGACCAGCGCATGCGCACAG |
| | | TGCGTC |
| 127 | hOPA1_H1A(−2 + 28)mm | CACTTTACCCTTTCTAGGCGGGCAG |
| | | CACGA |
| 128 | hOPA1_H1A(−1 + 29)mm | CCACTTTACCCTTTCTAGGCGGGCA |
| | | GCACG |
| 129 | hOPA1_H1A(+1 + 30)mm | ACCACTTTACCCTTTCTAGGCGGGC |
| | | AGCAC |
| 130 | hOPA1_H1A(+2 + 31)mm | AACCACTTTACCCTTTCTAGGCGG |
| | | GCAGCA |
| 131 | hOPA1_H1A(+3 + 32)mm | CAACCACTTTACCCTTTCTAGGCG |
| | | GGCAGC |
| 132 | hOPA1_H1A(+4 + 32)mm | CAACCACTTTACCCTTTCTAGGCG |
| | | GGCAG |
| 133 | hOPA1_H1A(+5 + 32)mm | CAACCACTTTACCCTTTCTAGGCG |
| | | GGCA |
| 134 | hOPA1_H1A(+6 + 32)mm | CAACCACTTTACCCTTTCTAGGCGGGC |
| 135 | hOPAI_H1A(+7 + 32)mm | CAACCACTTTACCCTTTCTAGGCGGG |
| 136 | hOPA1_H1A(+8 + 32)mm | CAACCACTTTACCCTTTCTAGGCGG |
| 137 | hOPA1_H1A(+9 + 32)mm | CAACCACTTTACCCTTTCTAGGCG |
| 138 | hOPA1_H1A(+10 + 34)mm | AACAACCACTTTACCCTTTCTAGGC |

SEQ ID: 139: cDNA sequence of the 3′ UTR located within exon 30 of an OPA transcript (GRCh38/hg38: chr3 193694606-193697811)
GTCCGTTCCCGACGCACTGTGCGCATGCGCTGGTCCTCCGCGGACCGTTCGTGCTGCCCGCCTAGAAAGGGTGAAGAATCGTACTCATAATCAGCTCTGCATACATCTGAAGAACAAAAACATCAACGTCTTTTGTCCAGCCTCTTTTTCTTCTGCTGTTCCACCTTTCTAAACATACAATAAAGTCATGGGATAAAAATAATCGATGTATGTTACGGGCGCTTTAACCATCAGCTGCCTCTCGAATGGAAGAACAGTGGTAATGGATTAACATCCTATTTTGTTGTACTAAAGTGACAAATCGGAATAATATAATTGGTATGGCCATTAGGTTCAGTCCTTGAAGATAAGAAACTTGTTCTCTGTTTGTTGTCTTATTTGTGGTGGCACTCGTTTAATGGATTAACTGAGGTTGCTCAATGTTCAGTTTCTTTTCCAGAAATACAATGCTAGGTGTTTTGAAATAAAACTTATATAGCAATTGTTTAAAGTTATCAATTGTATATAAAATCACAGTAGCCTGCTAAATCATTGTATGTGTCTGTAGTATTCTATTCCCAGAAACTATTTGACCATGATAATTCAGTTTATATTCACCACATGAAAGAAAAATGGGTAACAGAAGAACCCTTAAAACAGGTTAATTTGGATTGTAACGTTCAGTGAAAGAAATTTCAACCCTTCATAGCCAGCGAAGAAATTTGCCTTGGAAGCCAAGTCAGTACCAGCTTACCTATTTGATTCAGTTGCTGTTTTCTCACTCTCTATATCCATTTGAAATTGATTTATTTTAGATGTTGTATACTTACGTTAGGCTTTCTGTTAATAGTGGTTTTTCTCCTGTTGACAGAGCCACCGGATTATGACACAGGATGAGGAAGATTAAGGATAATCAATTGACTAATTTCATTTAGAATATTATCAAACATTTCAACTAGGTATCAGAAAAAGGCTTTCTTTCATAAGACTATTTTAAATAGAAATTATTTCAACAATTAAAGTAATGTTGACCATCCCCCTCTCAGCTGAATAAAGAAAAATTTAGTTCAATTTATTGCAATTTAATTACAATACTACCTTCACAACATTTTCATGTGTTTTAAATAAATATTTTTTAATTGGCTAAAGGACATTCAAGCAAAGAAATGCTTTCTTTACTTAAAATGTCTATCTCATTTGCTGCCTTTTCACTAAGCCTTTACTTTGTTAATAAAAGTGTCCATTGTGTGATGTTTTTGATTTTACAGTTTGCTAAATCTTATTTTCTTGGAGTTGCTTTTTGGTAACAGCCCCATTGCTACTCCCCATTTTATTGTTTTACATCAATGCATGCTTCGTTGTGATCCCTCAAGATGTAACACTTGGTATGCTCGGTTGAGGATATGAAAAAATACTTCCGAAACCAGGAATTCAATGTATGTTTGTTTTATACTGTTTGATAAGAAAAGTAGGTCCAGCCTTAAGCAGCACAGATGCGCTGGTAGATGCATAGTCAGGAACTTTTTTTATTTCTTTTAGGTCTAGGGACAGGAGTGAATAGAAAGGGAGGAGAGCTCTATTATGTTCTATACACAGATTAGGAGATGACCTTACTGGGTACACCCCTCTAACCAGTGCTTACAGGTTAATGCATGTTAATGAATATTTTTGCAGTTGTAAAGCATAACAATTACAACTACACATCTATTTCTAAAGAATAAAACAGGACCATATTTATTTACTTCTGTCAACTATAGAAAGAAAGACCTTCAGCTGTATTTCCACAGATTTCTCCCAAGGAAAAGGCTAATATTAGTCACTACTGTTATCACATCCCTTTGTATAAGTTTTAAAAAGAGATGGAGGGAGATCTTCATTTCTTTGAGGAGATCAGTATTGTAACGTATGTGAATAGATGATAACAATTAATATTACTAAAAGTCCCACATGAGAGTCCTGACGCCCTCTCCATGCCCCACAGTAATGTGGCTTCTTTCATGGGTTTTTTTTTCTTCTTTTTAGCTGATCTCATCCTAAGCATGCTTTATTTTTCCTTGAAAGCTAGGTATTTATCAACTGCAGATGTTATTGAAAGAAAATAAAATTCAGTCTCAAGAGTAAACCCTGTGTCTTGTGTCTGTAGTTCAAAAGTCAGAAATGATTCTAATTTAAACAAAAAGATACTAAATATACAGAAGTTAAATTCGAACTAGCCACAGAATCATTTGTTTTTATGTCAGAATTTGCAAAGAGTGGAGTGGACAAAGCTCTGTATGGAAGACTGAACAACTGTAAATAGATGATATCCAAACTTAATTTGGCTAGGACTTCAATTTTAAAAATCAGTGTACCTAGGCAGTGCACAGCACGAAATAAGTGGCCCTTGCAGCTTCCCCGTTTAACCCACTGTGCTATAGTTGCGGGTGGAACAGTCAACCTTTCTAGTAGTTTATGATATTGCCCTCTTTGTATTCCCATTTTCTACAGTTTTTTCCGCAGACTTCTTTCTGCAAATTATTCAGCCTCCAAATGCAAATGAATGATATAAAAATAAGTAGGGAACATGGCAGAGAGTGGTGCTTCCCAGCCTCACAATGTGGGAATTTGACATAGGATGAGAGTCAGAGTATAGGTTTAAAAGATAAAATCTTTAGTTAATAATTTTGTATTTATTTATTCTAGATGTATGTATCTGAGGAAAGAAATCTGGTATTTTTGCTTTCCAATAAAGGGGATCAAAGTAATGGTTTTTCTCTCAGTTCTCTAAGCTGGTCTATGTTATAGCTCTAGCAGTATGGAAATGTGCTTTAAAATATGCTTACCTTTTGAATGATCATGGCTATATGTTGTTGAGATATTTGAAACTTACCTTGTTTTCACTTGTGCACTGTGAATGAACTTTGTATTATTTTTTTAAAACCTTCACATTACGTGTAGATATTATTGCAACTTATATTTTGCCTGAGCTTGATCAAAGGTCATTTGTGTAGATGAGTAATTAAAAAATATTTAAATCACATTATAATTCTATTATTGGAGAGCATCTTTTAAATTTTTTTCTGTTTTAACGAGGGAAAGAGAAACCTGTATACCTAGGGTCATTATTTGACCCCATAGTATAACCAGATTCATGGTCTAACAAGCTCTCAGTGTGGCTTTTCTCTGAATGCTTGAATTTCACATGCCTTGCATTTCACAGTTGTACTCCATGGTCAACCGGTGCTTTTTTTCACATCGTGGTACTTGTCAAAACATTTTGTTATTTTCCTTGGTAAAATATATAAAAAAGGTTTTCTAATTTCA

TABLE 4
List of antisense oligonucleotide sequences with 25 nucleotides in
length that target the 3′ UTR of an OPA1 transcript.

| SEQ | | | SEQ | | |
|---|---|---|---|---|---|
| ID | ASO Coordinates | Sequence 5′>3′ | ID | ASO Coordinates | Sequence 5′>3′ |
| 140 | OPA1 H30:31 | AGCTGATTATGAGTACGATTTTAAT | 156 | OPA1 H313UTR | GAGGCTGGACAAAAGACGTTGATGT |
| | 3UTR(+1+25) | | | (+49+73) | |
| 141 | OPA1 H30:31 | CAGAGCTGATTATGAGTACGATTTT | 157 | OPA1 H313UTR | AAAGAGGCTGGACAAAAGACGTTGA |
| | 3UTR(+4+28) | | | (+52+76) | |
| 142 | OPA1 H31 | ATGCAGAGCTGATTATGAGTACGAT | 158 | OPA1 H313 | GAAAAAGAGGCTGGACAAAAGACGT |
| | 3UTR(+7+31) | | | UTR(+55+79) | |
| 143 | OPA1 H31 | TGTATGCAGAGCTGATTATGAGTAC | 159 | OPA1 H31 | GAAGAAAAAGAGGCTGGACAAAAGA |
| | 3UTR(+10+34) | | | 3UTR(+58+82) | |
| 144 | OPA1 H31 | AGATGTATGCAGAGCTGATTATGAG | 160 | OPA1 H31 | GCAGAAGAAAAAGAGGCTGGACAAA |
| | 3UTR(+13+37) | | | 3UTR(+61+85) | |
| 145 | OPA1 H31 | TTCAGATGTATGCAGAGCTGATTAT | 161 | OPA1 H31 | ACAGCAGAAGAAAAAGAGGCTGGAC |
| | 3UTR(+16+40) | | | 3UTR(+64+88) | |
| 146 | OPA1 H31 | TTCTTCAGATGTATGCAGAGCTGAT | 162 | OPA1 H31 | GGAACAGCAGAAGAAAAAGAGGCTG |
| | 3UTR(+19+43) | | | 3UTR(+67+91) | |
| 147 | OPA1 H31 | TTGTTCTTCAGATGTATGCAGAGCT | 163 | OPA1 H31 | GGTGGAACAGCAGAAGAAAAAGAGG |
| | 3UTR(+22+46) | | | 3UTR(+70+94) | |
| 148 | OPA1 H31 | TTTTTGTTCTTCAGATGTATGCAGA | 164 | OPA1 H31 | AAAGGTGGAACAGCAGAAGAAAAAG |
| | 3UTR(+25+49) | | | 3UTR(+73+97) | |
| 149 | OPA1 H31 | ATGTTTTTGTTCTTCAGATGTATGC | 165 | OPA1 H31 | TAGAAAGGTGGAACAGCAGAAGAAA |
| | 3UTR(+28+52) | | | 3UTR(+76+100) | |
| 150 | OPA1 H31 | TTGATGTTTTTGTTCTTCAGATGTA | 166 | OPA1 H31 | GTTTAGAAAGGTGGAACAGCAGAAG |
| | 3UTR(+31+55) | | | 3UTR(+79+103) | |
| 151 | OPA1 H31 | ACGTTGATGTTTTTGTTCTTCAGAT | 167 | OPA1 H31 | TATGTTTAGAAAGGTGGAACAGCAG |
| | 3UTR(+34+58) | | | 3UTR(+82+106) | |
| 152 | OPA1 H31 | AAGACGTTGATGTTTTTGTTCTTCA | 168 | OPA1 H31 | TTGTATGTTTAGAAAGGTGGAACAG |
| | 3UTR(+37+61) | | | 3UTR(+85+109) | |
| 153 | OPA1 H31 | CAAAAGACGTTGATGTTTTTGTTCT | 169 | OPA1 H31 | TTATTGTATGTTTAGAAAGGTGGAA |
| | 3UTR(+40+64) | | | 3UTR(+88+112) | |
| 154 | OPA1 H31 | GGACAAAAGACGTTGATGTTTTTGT | 170 | OPA1 H31 | ACTTTATTGTATGTTTAGAAAGGTG |
| | 3UTR(+43+67) | | | 3UTR(+91+115) | |
| 155 | OPA1 H31 | GCTGGACAAAAGACGTTGATGTTTT | | | |
| | 3UTR(+46+70) | | | | |
| 171 | OPA1 H31 | ATGACTTTATTGTATGTTTAGAAAG | 189 | OPA1 H31 | GAGAGGCAGCTGATGGTTAAAGCGC |
| | 3UTR(+94+118) | | | 3UTR(+148+172) | |
| 172 | OPA1 H31 | CCCATGACTTTATTGTATGTTTAGA | 190 | OPA1 H31 | TTCGAGAGGCAGCTGATGGTTAAAG |
| | 3UTR(+97+121) | | | 3UTR(+151+175) | |
| 173 | OPA1 H31 | TATCCCATGACTTTATTGTATGTTT | 191 | OPA1 H31 | CCATTCGAGAGGCAGCTGATGGTTA |
| | 3UTR(+100+124) | | | 3UTR(+154+178) | |
| 174 | OPA1 H31 | TTTTATCCCATGACTTTATTGTATG | 192 | OPA1 H31 | CTTCCATTCGAGAGGCAGCTGATGG |
| | 3UTR(+103+127) | | | 3UTR(+157+181) | |
| 175 | OPA1 H31 | TATTTTTATCCCATGACTTTATTGT | 193 | OPA1 H31 | GTTCTTCCATTCGAGAGGCAGCTGA |
| | 3UTR(+106+130) | | | 3UTR(+160+184) | |
| 176 | OPA1 H31 | GATTATTTTTATCCCATGACTTTAT | 194 | OPA1 H31 | ACTGTTCTTCCATTCGAGAGGCAGC |
| | 3UTR(+109+133) | | | 3UTR(+163+187) | |
| 177 | OPA1 H31 | ATCGATTATTTTTATCCCATGACTT | 195 | OPA1 H31 | ACCACTGTTCTTCCATTCGAGAGGC |
| | 3UTR(+112+136) | | | 3UTR(+166+190) | |
| 178 | OPA1 H31 | TACATCGATTATTTTTATCCCATGA | 196 | OPA1 H31 | ATTACCACTGTTCTTCCATTCGAGA |
| | 3UTR(+115+139) | | | 3UTR(+169+193) | |
| 179 | OPA1 H31 | ACATACATCGATTATTTTTATCCCA | 197 | OPA1 H31 | TCCATTACCACTGTTCTTCCATTCG |
| | 3UTR(+118+142) | | | 3UTR(+172+196) | |
| 180 | OPA1 H31 | GTAACATACATCGATTATTTTTATC | 198 | OPA1 H31 | TAATCCATTACCACTGTTCTTCCAT |
| | 3UTR(+121+145) | | | 3UTR(+175+199) | |
| 181 | OPA1 H31 | CCCGTAACATACATCGATTATTTTT | 199 | OPA1 H31 | TGTTAATCCATTACCACTGTTCTTC |
| | 3UTR(+124+148) | | | 3UTR(+178+202) | |
| 182 | OPA1 H31 | GCGCCCGTAACATACATCGATTATT | 200 | OPA1 H31 | GGATGTTAATCCATTACCACTGTTC |
| | 3UTR(+127+151) | | | 3UTR(+181+205) | |
| 183 | OPA1 H31 | AAAGCGCCCGTAACATACATCGATT | 201 | OPA1 H31 | ATAGGATGTTAATCCATTACCACTG |
| | 3UTR(+130+154) | | | 3UTR(+184+208) | |
| 184 | OPA1 H31 | GTTAAAGCGCCCGTAACATACATCG | 202 | OPA1 H31 | AAAATAGGATGTTAATCCATTACCA |
| | 3UTR(+133+157) | | | 3UTR(+187+211) | |
| 185 | OPA1 H31 | ATGGTTAAAGCGCCCGTAACATACA | 203 | OPA1 H31 | AACAAAATAGGATGTTAATCCATTA |
| | 3UTR(+136+160) | | | 3UTR(+190+214) | |
| 186 | OPA1 H31 | CTGATGGTTAAAGCGCCCGTAACAT | 204 | OPA1 H31 | TACAACAAAATAGGATGTTAATCCA |
| | 3UTR(+139+163) | | | 3UTR(+193+217) | |
| 187 | OPA1 H31 | CAGCTGATGGTTAAAGCGCCCGTAA | 205 | OPA1 H31 | TAGTACAACAAAATAGGATGTTAAT |
| | 3UTR(+142+166) | | | 3UTR(+196+220) | |
| 188 | OPA1 H31 | AGGCAGCTGATGGTTAAAGCGCCCG | 206 | OPA1 H31 | CTTTAGTACAACAAAATAGGATGTT |
| | 3UTR(+145+169) | | | 3UTR(+199+223) | |
| 207 | OPA1 H31 | TCACTTTAGTACAACAAAATAGGAT | 225 | OPA1 H31 | CTTATCTTCAAGGACTGAACCTAAT |
| | 3UTR(+202+226) | | | 3UTR(+256+280) | |
| 208 | OPA1 H31 | TTGTCACTTTAGTACAACAAAATAG | 226 | OPA1 H31 | TTTCTTATCTTCAAGGACTGAACCT |
| | 3UTR(+205+229) | | | 3UTR(+259+283) | |
| 209 | OPA1 H31 | GATTTGTCACTTTAGTACAACAAAA | 227 | OPA1 H31 | AAGTTTCTTATCTTCAAGGACTGAA |
| | 3UTR(+208+232) | | | 3UTR(+262+286) | |
| 210 | OPA1 H31 | TCCGATTTGTCACTTTAGTACAACA | 228 | OPA1 H31 | AACAAGTTTCTTATCTTCAAGGACT |
| | 3UTR(+211+235) | | | 3UTR(+265+289) | |
| 211 | OPA1 H31 | TATTCCGATTTGTCACTTTAGTACA | 229 | OPA1 H31 | GAGAACAAGTTTCTTATCTTCAAGG |
| | 3UTR(+214+238) | | | 3UTR(+268+292) | |
| 212 | OPA1 H31 | TATTATTCCGATTTGTCACTTTAGT | 230 | OPA1 H31 | ACAGAGAACAAGTTTCTTATCTTCA |
| | 3UTR(+217+241) | | | 3UTR(+271+295) | |
| 213 | OPA1 H31 | TTATATTATTCCGATTTGTCACTTT | 231 | OPA1 H31 | CAAACAGAGAACAAGTTTCTTATCT |
| | 3UTR(+220+244) | | | 3UTR(+274+298) | |
| 214 | OPA1 H31 | CAATTATATTATTCCGATTTGTCAC | 232 | OPA1 H31 | CAACAAACAGAGAACAAGTTTCTTA |
| | 3UTR(+223+247) | | | 3UTR(+277+301) | |
| 215 | OPA1 H31 | TACCAATTATATTATTCCGATTTGT | 233 | OPA1 H31 | AGACAACAAACAGAGAACAAGTTTC |
| | 3UTR(+226+250) | | | 3UTR(+280+304) | |
| 216 | OPA1 H31 | CCATACCAATTATATTATTCCGATT | 234 | OPA1 H31 | ATAAGACAACAAACAGAGAACAAGT |
| | 3UTR(+229+253) | | | 3UTR(+283+307) | |
| 217 | OPA1 H31 | TGGCCATACCAATTATATTATTCCG | 235 | OPA1 H31 | CAAATAAGACAACAAACAGAGAACA |
| | 3UTR(+232+256) | | | 3UTR(+286+310) | |
| 218 | OPA1 H31 | TAATGGCCATACCAATTATATTATT | 236 | OPA1 H31 | CCACAAATAAGACAACAAACAGAGA |
| | 3UTR(+235+259) | | | 3UTR(+289+313) | |
| 219 | OPA1 H31 | ACCTAATGGCCATACCAATTATATT | 237 | OPA1 H31 | CCACCACAAATAAGACAACAAACAG |
| | 3UTR(+238+262) | | | 3UTR(+292+316) | |
| 220 | OPA1 H31 | TGAACCTAATGGCCATACCAATTAT | 238 | OPA1 H31 | GTGCCACCACAAATAAGACAACAAA |
| | 3UTR(+241+265) | | | 3UTR(+295+319) | |
| 221 | OPA1 H31 | GACTGAACCTAATGGCCATACCAAT | 239 | OPA1 H31 | CGAGTGCCACCACAAATAAGACAAC |
| | 3UTR(+244+268) | | | 3UTR(+298+322) | |
| 222 | OPA1 H31 | AAGGACTGAACCTAATGGCCATACC | 240 | OPA1 H31 | AAACGAGTGCCACCACAAATAAGAC |
| | 3UTR(+247+271) | | | 3UTR(+301+325) | |
| 223 | OPA1 H31 | TTCAAGGACTGAACCTAATGGCCAT | 241 | OPA1 H31 | ATTAAACGAGTGCCACCACAAATAA |
| | 3UTR(+250+274) | | | 3UTR(+304+328) | |
| 224 | OPA1 H31 | ATCTTCAAGGACTGAACCTAATGGC | 242 | OPA1 H31 | TCCATTAAACGAGTGCCACCACAAA |
| | 3UTR(+253+277) | | | 3UTR(+307+331) | |
| 243 | OPA1 H31 | TAATCCATTAAACGAGTGCCACCAC | 261 | OPA1 H31 | AAACACCTAGCATTGTATTTCTGGA |
| | 3UTR(+310+334) | | | 3UTR(+364+388) | |
| 244 | OPA1 H31 | AGTTAATCCATTAAACGAGTGCCAC | 262 | OPA1 H31 | TCAAAACACCTAGCATTGTATTTCT |
| | 3UTR(+313+337) | | | 3UTR(+367+391) | |
| 245 | OPA1 H31 | CTCAGTTAATCCATTAAACGAGTGC | 263 | OPA1 H31 | ATTTCAAAACACCTAGCATTGTATT |
| | 3UTR(+316+340) | | | 3UTR(+370+394) | |
| 246 | OPA1 H31 | AACCTCAGTTAATCCATTAAACGAG | 264 | OPA1 H31 | TTTATTTCAAAACACCTAGCATTGT |
| | 3UTR(+319+343) | | | 3UTR(+373+397) | |
| 247 | OPA1 H31 | AGCAACCTCAGTTAATCCATTAAAC | 265 | OPA1 H31 | AGTTTTATTTCAAAACACCTAGCAT |
| | 3UTR(+322+346) | | | 3UTR(+376+400) | |
| 248 | OPA1 H31 | TTGAGCAACCTCAGTTAATCCATTA | 266 | OPA1 H31 | ATAAGTTTTATTTCAAAACACCTAG |
| | 3UTR(+325+349) | | | 3UTR(+379+403) | |
| 249 | OPA1 H31 | ACATTGAGCAACCTCAGTTAATCCA | 267 | OPA1 H31 | TATATAAGTTTTATTTCAAAACACC |
| | 3UTR(+328+352) | | | 3UTR(+382+406) | |
| 250 | OPA1 H31 | TGAACATTGAGCAACCTCAGTTAAT | 268 | OPA1 H31 | TGCTATATAAGTTTTATTTCAAAAC |
| | 3UTR(+331+355) | | | 3UTR(+385+409) | |
| 251 | OPA1 H31 | AACTGAACATTGAGCAACCTCAGTT | 269 | OPA1 H31 | AATTGCTATATAAGTTTTATTTCAA |
| | 3UTR(+334+358) | | | 3UTR(+388+412) | |
| 252 | OPA1 H31 | AGAAACTGAACATTGAGCAACCTCA | 270 | OPA1 H31 | AACAATTGCTATATAAGTTTTATTT |
| | 3UTR(+337+361) | | | 3UTR(+391+415) | |
| 253 | OPA1 H31 | AAAAGAAACTGAACATTGAGCAACC | 271 | OPA1 H31 | TTAAACAATTGCTATATAAGTTTTA |
| | 3UTR(+340+364) | | | 3UTR(+394+418) | |
| 254 | OPA1 H31 | TGGAAAAGAAACTGAACATTGAGCA | 272 | OPA1 H31 | ACTTTAAACAATTGCTATATAAGTT |
| | 3UTR(+343+367) | | | 3UTR(+397+421) | |
| 255 | OPA1 H31 | TTCTGGAAAAGAAACTGAACATTGA | 273 | OPA1 H31 | ATAACTTTAAACAATTGCTATATAA |
| | 3UTR(+346+370) | | | 3UTR(+400+424) | |
| 256 | OPA1 H31 | TATTTCTGGAAAAGAAACTGAACAT | 274 | OPA1 H31 | TTGATAACTTTAAACAATTGCTATA |
| | 3UTR(+349+373) | | | 3UTR(+403+427) | |
| 257 | OPA1 H31 | TTGTATTTCTGGAAAAGAAACTGAA | 275 | OPA1 H31 | CAATTGATAACTTTAAACAATTGCT |
| | 3UTR(+352+376) | | | 3UTR(+406+430) | |
| 258 | OPA1 H31 | GCATTGTATTTCTGGAAAAGAAACT | 276 | OPA1 H31 | ATACAATTGATAACTTTAAACAATT |
| | 3UTR(+355+379) | | | 3UTR(+409+433) | |
| 259 | OPA1 H31 | CTAGCATTGTATTTCTGGAAAAGAA | 277 | OPA1 H31 | TATATACAATTGATAACTTTAAACA |
| | 3UTR(+358+382) | | | 3UTR(+412+436) | |
| 260 | OPA1 H31 | CACCTAGCATTGTATTTCTGGAAAA | 278 | OPA1 H31 | TTTTATATACAATTGATAACTTTAA |
| | 3UTR(+361+385) | | | 3UTR(+415+439) | |
| 279 | OPA1 H31 | TGATTTTATATACAATTGATAACTT | 297 | OPA1 H31 | TAGTTTCTGGGAATAGAATACTACA |
| | 3UTR(+418+442) | | | 3UTR(+472+496) | |
| 280 | OPA1 H31 | CTGTGATTTTATATACAATTGATAA | 298 | OPA1 H31 | AAATAGTTTCTGGGAATAGAATACT |
| | 3UTR(+421+445) | | | 3UTR(+475+499) | |
| 281 | OPA1 H31 | CTACTGTGATTTTATATACAATTGA | 299 | OPA1 H31 | GTCAAATAGTTTCTGGGAATAGAAT |
| | 3UTR(+424+448) | | | 3UTR(+478+502) | |
| 282 | OPA1 H31 | AGGCTACTGTGATTTTATATACAAT | 300 | OPA1 H31 | ATGGTCAAATAGTTTCTGGGAATAG |
| | 3UTR(+427+451) | | | 3UTR(+481+505) | |
| 283 | OPA1 H31 | AGCAGGCTACTGTGATTTTATATAC | 301 | OPA1 H31 | ATCATGGTCAAATAGTTTCTGGGAA |
| | 3UTR(+430+454) | | | 3UTR(+484+508) | |
| 284 | OPA1 H31 | TTTAGCAGGCTACTGTGATTTTATA | 302 | OPA1 H31 | ATTATCATGGTCAAATAGTTTCTGG |
| | 3UTR(+433+457) | | | 3UTR(+487+511) | |
| 285 | OPA1 H31 | TGATTTAGCAGGCTACTGTGATTTT | 303 | OPA1 H31 | TGAATTATCATGGTCAAATAGTTTC |
| | 3UTR(+436+460) | | | 3UTR(+490+514) | |
| 286 | OPA1 H31 | CAATGATTTAGCAGGCTACTGTGAT | 304 | OPA1 H31 | AACTGAATTATCATGGTCAAATAGT |
| | 3UTR(+439+463) | | | 3UTR(+493+517) | |
| 287 | OPA1 H31 | ATACAATGATTTAGCAGGCTACTGT | 305 | OPA1 H31 | ATAAACTGAATTATCATGGTCAAAT |
| | 3UTR(+442+466) | | | 3UTR(+496+520) | |
| 288 | OPA1 H31 | CACATACAATGATTTAGCAGGCTAC | 306 | OPA1 H31 | AATATAAACTGAATTATCATGGTCA |
| | 3UTR(+445+469) | | | 3UTR(+499+523) | |
| 289 | OPA1 H31 | AGACACATACAATGATTTAGCAGGC | 307 | OPA1 H31 | GTGAATATAAACTGAATTATCATGG |
| | 3UTR(+448+472) | | | 3UTR(+502+526) | |
| 290 | OPA1 H31 | TACAGACACATACAATGATTTAGCA | 308 | OPA1 H31 | GTGGTGAATATAAACTGAATTATCA |
| | 3UTR(+451+475) | | | 3UTR(+505+529) | |
| 291 | OPA1 H31 | TACTACAGACACATACAATGATTTA | 309 | OPA1 H31 | CATGTGGTGAATATAAACTGAATTA |
| | 3UTR(+454+478) | | | 3UTR(+508+532) | |
| 292 | OPA1 H31 | GAATACTACAGACACATACAATGAT | 310 | OPA1 H31 | TTTCATGTGGTGAATATAAACTGAA |
| | 3UTR(+457+481) | | | 3UTR(+511+535) | |
| 293 | OPA1 H31 | ATAGAATACTACAGACACATACAAT | 311 | OPA1 H31 | TTCTTTCATGTGGTGAATATAAACT |
| | 3UTR(+460+484) | | | 3UTR(+514+538) | |
| 294 | OPA1 H31 | GGAATAGAATACTACAGACACATAC | 312 | OPA1 H31 | TTTTTCTTTCATGTGGTGAATATAA |
| | 3UTR(+463+487) | | | 3UTR(+517+541) | |
| 295 | OPA1 H31 | CTGGGAATAGAATACTACAGACACA | 313 | OPA1 H31 | CCATTTTTCTTTCATGTGGTGAATA |
| | 3UTR(+466+490) | | | 3UTR(+520+544) | |
| 296 | OPA1 H31 | TTTCTGGGAATAGAATACTACAGAC | 314 | OPA1 H31 | TACCCATTTTTCTTTCATGTGGTGA |
| | 3UTR(+469+493) | | | 3UTR(+523+547) | |
| 315 | OPA1 H31 | TGTTACCCATTTTTCTTTCATGTGG | 333 | OPA1 H31 | AAATTTCTTTCACTGAACGTTACAA |
| | 3UTR(+526+550) | | | 3UTR(+580+604) | |
| 316 | OPA1 H31 | TTCTGTTACCCATTTTTCTTTCATG | 334 | OPA1 H31 | TTGAAATTTCTTTCACTGAACGTTA |
| | 3UTR(+529+553) | | | 3UTR(+583+607) | |
| 317 | OPA1 H31 | TTCTTCTGTTACCCATTTTTCTTTC | 335 | OPA1 H31 | GGGTTGAAATTTCTTTCACTGAACG |
| | 3UTR(+532+556) | | | 3UTR(+586+610) | |
| 318 | OPA1 H31 | GGGTTCTTCTGTTACCCATTTTTCT | 336 | OPA1 H31 | GAAGGGTTGAAATTTCTTTCACTGA |
| | 3UTR(+535+559) | | | 3UTR(+589+613) | |
| 319 | OPA1 H31 | TAAGGGTTCTTCTGTTACCCATTTT | 337 | OPA1 H31 | TATGAAGGGTTGAAATTTCTTTCAC |
| | 3UTR(+538+562) | | | 3UTR(+592+616) | |
| 320 | OPA1 H31 | TTTTAAGGGTTCTTCTGTTACCCAT | 338 | OPA1 H31 | GGCTATGAAGGGTTGAAATTTCTTT |
| | 3UTR(+541+565) | | | 3UTR(+595+619) | |
| 321 | OPA1 H31 | CTGTTTTAAGGGTTCTTCTGTTACC | 339 | OPA1 H31 | GCTGGCTATGAAGGGTTGAAATTTC |
| | 3UTR(+544+568) | | | 3UTR(+598+622) | |
| 322 | OPA1 H31 | AACCTGTTTTAAGGGTTCTTCTGTT | 340 | OPA1 H31 | TTCGCTGGCTATGAAGGGTTGAAAT |
| | 3UTR(+547+571) | | | 3UTR(+601+625) | |
| 323 | OPA1 H31 | ATTAACCTGTTTTAAGGGTTCTTCT | 341 | OPA1 H31 | TTCTTCGCTGGCTATGAAGGGTTGA |
| | 3UTR(+550+574) | | | 3UTR(+604+628) | |
| 324 | OPA1 H31 | CAAATTAACCTGTTTTAAGGGTTCT | 342 | OPA1 H31 | AATTTCTTCGCTGGCTATGAAGGGT |
| | 3UTR(+553+577) | | | 3UTR(+607+631) | |
| 325 | OPA1 H31 | ATCCAAATTAACCTGTTTTAAGGGT | 343 | OPA1 H31 | GCAAATTTCTTCGCTGGCTATGAAG |
| | 3UTR(+556+580) | | | 3UTR(+610+634) | |
| 326 | OPA1 H31 | ACAATCCAAATTAACCTGTTTTAAG | 344 | OPA1 H31 | AAGGCAAATTTCTTCGCTGGCTATG |
| | 3UTR(+559+583) | | | 3UTR(+613+637) | |
| 327 | OPA1 H31 | GTTACAATCCAAATTAACCTGTTTT | 345 | OPA1 H31 | TCCAAGGCAAATTTCTTCGCTGGCT |
| | 3UTR(+562+586) | | | 3UTR(+616+640) | |
| 328 | OPA1 H31 | AACGTTACAATCCAAATTAACCTGT | 346 | OPA1 H31 | GCTTCCAAGGCAAATTTCTTCGCTG |
| | 3UTR(+565+589) | | | 3UTR(+619+643) | |
| 329 | OPA1 H31 | CTGAACGTTACAATCCAAATTAACC | 347 | OPA1 H31 | TTGGCTTCCAAGGCAAATTTCTTCG |
| | 3UTR(+568+592) | | | 3UTR(+622+646) | |
| 330 | OPA1 H31 | TCACTGAACGTTACAATCCAAATTA | 348 | OPA1 H31 | GACTTGGCTTCCAAGGCAAATTTCT |
| | 3UTR(+571+595) | | | 3UTR(+625+649) | |
| 331 | OPA1 H31 | CTTTCACTGAACGTTACAATCCAAA | 349 | OPA1 H31 | ACTGACTTGGCTTCCAAGGCAAATT |
| | 3UTR(+574+598) | | | 3UTR(+628+652) | |
| 332 | OPA1 H31 | TTTCTTTCACTGAACGTTACAATCC | 350 | OPA1 H31 | GGTACTGACTTGGCTTCCAAGGCAA |
| | 3UTR(+577+601) | | | 3UTR(+631+655) | |
| 351 | OPA1 H31 | GCTGGTACTGACTTGGCTTCCAAGG | 369 | OPA1 H31 | CAATTTCAAATGGATATAGAGAGTG |
| | 3UTR(+634+658) | | | 3UTR(+688+712) | |
| 352 | OPA1 H31 | TAAGCTGGTACTGACTTGGCTTCCA | 370 | OPA1 H31 | AATCAATTTCAAATGGATATAGAGA |
| | 3UTR(+637+661) | | | 3UTR(+691+715) | |
| 353 | OPA1 H31 | AGGTAAGCTGGTACTGACTTGGCTT | 371 | OPA1 H31 | ATAAATCAATTTCAAATGGATATAG |
| | 3UTR(+640+664) | | | 3UTR(+694+718) | |
| 354 | OPA1 H31 | AATAGGTAAGCTGGTACTGACTTGG | 372 | OPA1 H31 | AAAATAAATCAATTTCAAATGGATA |
| | 3UTR(+643+667) | | | 3UTR(+697+721) | |
| 355 | OPA1 H31 | TCAAATAGGTAAGCTGGTACTGACT | 373 | OPA1 H31 | TCTAAAATAAATCAATTTCAAATGG |
| | 3UTR(+646+670) | | | 3UTR(+700+724) | |
| 356 | OPA1 H31 | GAATCAAATAGGTAAGCTGGTACTG | 374 | OPA1 H31 | ACATCTAAAATAAATCAATTTCAAA |
| | 3UTR(+649+673) | | | 3UTR(+703+727) | |
| 357 | OPA1 H31 | ACTGAATCAAATAGGTAAGCTGGTA | 375 | OPA1 H31 | ACAACATCTAAAATAAATCAATTTC |
| | 3UTR(+652+676) | | | 3UTR(+706+730) | |
| 358 | OPA1 H31 | GCAACTGAATCAAATAGGTAAGCTG | 376 | OPA1 H31 | TATACAACATCTAAAATAAATCAAT |
| | 3UTR(+655+679) | | | 3UTR(+709+733) | |
| 359 | OPA1 H31 | ACAGCAACTGAATCAAATAGGTAAG | 377 | OPA1 H31 | AAGTATACAACATCTAAAATAAATC |
| | 3UTR(+658+682) | | | 3UTR(+712+736) | |
| 360 | OPA1 H31 | AAAACAGCAACTGAATCAAATAGGT | 378 | OPA1 H31 | CGTAAGTATACAACATCTAAAATAA |
| | 3UTR(+661+685) | | | 3UTR(+715+739) | |
| 361 | OPA1 H31 | GAGAAAACAGCAACTGAATCAAATA | 379 | OPA1 H31 | TAACGTAAGTATACAACATCTAAAA |
| | 3UTR(+664+688) | | | 3UTR(+718+742) | |
| 362 | OPA1 H31 | AGTGAGAAAACAGCAACTGAATCAA | 380 | OPA1 H31 | GCCTAACGTAAGTATACAACATCTA |
| | 3UTR(+667+691) | | | 3UTR(+721+745) | |
| 363 | OPA1 H31 | GAGAGTGAGAAAACAGCAACTGAAT | 381 | OPA1 H31 | AAAGCCTAACGTAAGTATACAACAT |
| | 3UTR(+670+694) | | | 3UTR(+724+748) | |
| 364 | OPA1 H31 | ATAGAGAGTGAGAAAACAGCAACTG | 382 | OPA1 H31 | CAGAAAGCCTAACGTAAGTATACAA |
| | 3UTR(+673+697) | | | 3UTR(+727+751) | |
| 365 | OPA1 H31 | GATATAGAGAGTGAGAAAACAGCAA | 383 | OPA1 H31 | TAACAGAAAGCCTAACGTAAGTATA |
| | 3UTR(+676+700) | | | 3UTR(+730+754) | |
| 366 | OPA1 H31 | ATGGATATAGAGAGTGAGAAAACAG | 384 | OPA1 H31 | TATTAACAGAAAGCCTAACGTAAGT |
| | 3UTR(+679+703) | | | 3UTR(+733+757) | |
| 367 | OPA1 H31 | CAAATGGATATAGAGAGTGAGAAAA | 385 | OPA1 H31 | CACTATTAACAGAAAGCCTAACGTA |
| | 3UTR(+682+706) | | | 3UTR(+736+760) | |
| 368 | OPA1 H31 | TTTCAAATGGATATAGAGAGTGAGA | 386 | OPA1 H31 | AACCACTATTAACAGAAAGCCTAAC |
| | 3UTR(+685+709) | | | 3UTR(+739+763) | |
| 387 | OPA1 H31 | AAAAACCACTATTAACAGAAAGCCT | 405 | OPA1 H31 | TATCCTTAATCTTCCTCATCCTGTG |
| | 3UTR(+742+766) | | | 3UTR(+796+820) | |
| 388 | OPA1 H31 | GAGAAAAACCACTATTAACAGAAAG | 406 | OPA1 H31 | GATTATCCTTAATCTTCCTCATCCT |
| | 3UTR(+745+769) | | | 3UTR(+799+823) | |
| 389 | OPA1 H31 | CAGGAGAAAAACCACTATTAACAGA | 407 | OPA1 H31 | ATTGATTATCCTTAATCTTCCTCAT |
| | 3UTR(+748+772) | | | 3UTR(+802+826) | |
| 390 | OPA1 H31 | CAACAGGAGAAAAACCACTATTAAC | 408 | OPA1 H31 | TCAATTGATTATCCTTAATCTTCCT |
| | 3UTR(+751+775) | | | 3UTR(+805+829) | |
| 391 | OPA1 H31 | TGTCAACAGGAGAAAAACCACTATT | 409 | OPA1 H31 | TAGTCAATTGATTATCCTTAATCTT |
| | 3UTR(+754+778) | | | 3UTR(+808+832) | |
| 392 | OPA1 H31 | CTCTGTCAACAGGAGAAAAACCACT | 410 | OPA1 H31 | AATTAGTCAATTGATTATCCTTAAT |
| | 3UTR(+757+781) | | | 3UTR(+811+835) | |
| 393 | OPA1 H31 | TGGCTCTGTCAACAGGAGAAAAACC | 411 | OPA1 H31 | TGAAATTAGTCAATTGATTATCCTT |
| | 3UTR(+760+784) | | | 3UTR(+814+838) | |
| 394 | OPA1 H31 | CGGTGGCTCTGTCAACAGGAGAAAA | 412 | OPA1 H31 | AAATGAAATTAGTCAATTGATTATC |
| | 3UTR(+763+787) | | | 3UTR(+817+841) | |
| 395 | OPA1 H31 | ATCCGGTGGCTCTGTCAACAGGAGA | 413 | OPA1 H31 | TCTAAATGAAATTAGTCAATTGATT |
| | 3UTR(+766+790) | | | 3UTR(+820+844) | |
| 396 | OPA1 H31 | ATAATCCGGTGGCTCTGTCAACAGG | 414 | OPA1 H31 | TATTCTAAATGAAATTAGTCAATTG |
| | 3UTR(+769+793) | | | 3UTR(+823+847) | |
| 397 | OPA1 H31 | GTCATAATCCGGTGGCTCTGTCAAC | 415 | OPA1 H31 | TAATATTCTAAATGAAATTAGTCAA |
| | 3UTR(+772+796) | | | 3UTR(+826+850) | |
| 398 | OPA1 H31 | TGTGTCATAATCCGGTGGCTCTGTC | 416 | OPA1 H31 | TGATAATATTCTAAATGAAATTAGT |
| | 3UTR(+775+799) | | | 3UTR(+829+853) | |
| 399 | OPA1 H31 | TCCTGTGTCATAATCCGGTGGCTCT | 417 | OPA1 H31 | GTTTGATAATATTCTAAATGAAATT |
| | 3UTR(+778+802) | | | 3UTR(+832+856) | |
| 400 | OPA1 H31 | TCATCCTGTGTCATAATCCGGTGGC | 418 | OPA1 H31 | AATGTTTGATAATATTCTAAATGAA |
| | 3UTR(+781+805) | | | 3UTR(+835+859) | |
| 401 | OPA1 H31 | TCCTCATCCTGTGTCATAATCCGGT | 419 | OPA1 H31 | TGAAATGTTTGATAATATTCTAAAT |
| | 3UTR(+784+808) | | | 3UTR(+838+862) | |
| 402 | OPA1 H31 | TCTTCCTCATCCTGTGTCATAATCC | 420 | OPA1 H31 | AGTTGAAATGTTTGATAATATTCTA |
| | 3UTR(+787+811) | | | 3UTR(+841+865) | |
| 403 | OPA1 H31 | TAATCTTCCTCATCCTGTGTCATAA | 421 | OPA1 H31 | CCTAGTTGAAATGTTTGATAATATT |
| | 3UTR(+790+814) | | | 3UTR(+844+868) | |
| 404 | OPA1 H31 | CCTTAATCTTCCTCATCCTGTGTCA | 422 | OPA1 H31 | ATACCTAGTTGAAATGTTTGATAAT |
| | 3UTR(+793+817) | | | 3UTR(+847+871) | |
| 423 | OPA1 H31 | CTGATACCTAGTTGAAATGTTTGAT | 441 | OPA1 H31 | TTAATTGTTGAAATAATTTCTATTT |
| | 3UTR(+850+874) | | | 3UTR(+904+928) | |
| 424 | OPA1 H31 | TTTCTGATACCTAGTTGAAATGTTT | 442 | OPA1 H31 | ACTTTAATTGTTGAAATAATTTCTA |
| | 3UTR(+853+877) | | | 3UTR(+907+931) | |
| 425 | OPA1 H31 | CTTTTTCTGATACCTAGTTGAAATG | 443 | OPA1 H31 | ATTACTTTAATTGTTGAAATAATTT |
| | 3UTR(+856+880) | | | 3UTR(+910+934) | |
| 426 | OPA1 H31 | AGCCTTTTTCTGATACCTAGTTGAA | 444 | OPA1 H31 | AACATTACTTTAATTGTTGAAATAA |
| | 3UTR(+859+883) | | | 3UTR(+913+937) | |
| 427 | OPA1 H31 | GAAAGCCTTTTTCTGATACCTAGTT | 445 | OPA1 H31 | GTCAACATTACTTTAATTGTTGAAA |
| | 3UTR(+862+886) | | | 3UTR(+916+940) | |
| 428 | OPA1 H31 | AAAGAAAGCCTTTTTCTGATACCTA | 446 | OPA1 H31 | ATGGTCAACATTACTTTAATTGTTG |
| | 3UTR(+865+889) | | | 3UTR(+919+943) | |
| 429 | OPA1 H31 | ATGAAAGAAAGCCTTTTTCTGATAC | 447 | OPA1 H31 | GGGATGGTCAACATTACTTTAATTG |
| | 3UTR(+868+892) | | | 3UTR(+922+946) | |
| 430 | OPA1 H31 | CTTATGAAAGAAAGCCTTTTTCTGA | 448 | OPA1 H31 | AGGGGGATGGTCAACATTACTTTAA |
| | 3UTR(+871+895) | | | 3UTR(+925+949) | |
| 431 | OPA1 H31 | AGTCTTATGAAAGAAAGCCTTTTTC | 449 | OPA1 H31 | GAGAGGGGGATGGTCAACATTACTT |
| | 3UTR(+874+898) | | | 3UTR(+928+952) | |
| 432 | OPA1 H31 | AATAGTCTTATGAAAGAAAGCCTTT | 450 | OPA1 H31 | GCTGAGAGGGGGATGGTCAACATTA |
| | 3UTR(+877+901) | | | 3UTR(+931+955) | |
| 433 | OPA1 H31 | TAAAATAGTCTTATGAAAGAAAGCC | 451 | OPA1 H31 | TCAGCTGAGAGGGGGATGGTCAACA |
| | 3UTR(+880+904) | | | 3UTR(+934+958) | |
| 434 | OPA1 H31 | ATTTAAAATAGTCTTATGAAAGAAA | 452 | OPA1 H31 | TATTCAGCTGAGAGGGGGATGGTCA |
| | 3UTR(+883+907) | | | 3UTR(+937+961) | |
| 435 | OPA1 H31 | TCTATTTAAAATAGTCTTATGAAAG | 453 | OPA1 H31 | CTTTATTCAGCTGAGAGGGGGATGG |
| | 3UTR(+886+910) | | | 3UTR(+940+964) | |
| 436 | OPA1 H31 | ATTTCTATTTAAAATAGTCTTATGA | 454 | OPA1 H31 | TTTCTTTATTCAGCTGAGAGGGGGA |
| | 3UTR(+889+913) | | | 3UTR(+943+967) | |
| 437 | OPA1 H31 | ATAATTTCTATTTAAAATAGTCTTA | 455 | OPA1 H31 | ATTTTTCTTTATTCAGCTGAGAGGG |
| | 3UTR(+892+916) | | | 3UTR(+946+970) | |
| 438 | OPA1 H31 | GAAATAATTTCTATTTAAAATAGTC | 456 | OPA1 H31 | TAAATTTTTCTTTATTCAGCTGAGA |
| | 3UTR(+895+919) | | | 3UTR(+949+973) | |
| 439 | OPA1 H31 | GTTGAAATAATTTCTATTTAAAATA | 457 | OPA1 H31 | AACTAAATTTTTCTTTATTCAGCTG |
| | 3UTR(+898+922) | | | 3UTR(+952+976) | |
| 440 | OPA1 H31 | ATTGTTGAAATAATTTCTATTTAAA | 458 | OPA1 H31 | TTGAACTAAATTTTTCTTTATTCAG |
| | 3UTR(+901+925) | | | 3UTR(+955+979) | |
| 459 | OPA1 H31 | AAATTGAACTAAATTTTTCTTTATT | 477 | OPA1 H31 | TTATTTAAAACACATGAAAATGTTG |
| | 3UTR(+958+982) | | | 3UTR(+1012+1036) | |
| 460 | OPA1 H31 | AATAAATTGAACTAAATTTTTCTTT | 478 | OPA1 H31 | TATTTATTTAAAACACATGAAAATG |
| | 3UTR(+961+985) | | | 3UTR(+1015+1039) | |
| 461 | OPA1 H31 | TGCAATAAATTGAACTAAATTTTTC | 479 | OPA1 H31 | AAATATTTATTTAAAACACATGAAA |
| | 3UTR(+964+988) | | | 3UTR(+1018+1042) | |
| 462 | OPA1 H31 | AATTGCAATAAATTGAACTAAATTT | 480 | OPA1 H31 | AAAAAATATTTATTTAAAACACATG |
| | 3UTR(+967+991) | | | 3UTR(+1021+1045) | |
| 463 | OPA1 H31 | TTAAATTGCAATAAATTGAACTAAA | 481 | OPA1 H31 | ATTAAAAAATATTTATTTAAAACAC |
| | 3UTR(+970+994) | | | 3UTR(+1024+1048) | |
| 464 | OPA1 H31 | TAATTAAATTGCAATAAATTGAACT | 482 | OPA1 H31 | CCAATTAAAAAATATTTATTTAAAA |
| | 3UTR(+973+997) | | | 3UTR(+1027+1051) | |
| 465 | OPA1 H31 | TTGTAATTAAATTGCAATAAATTGA | 483 | OPA1 H31 | TAGCCAATTAAAAAATATTTATTTA |
| | 3UTR(+976+1000) | | | 3UTR(+1030+1054) | |
| 466 | OPA1 H31 | GTATTGTAATTAAATTGCAATAAAT | 484 | OPA1 H31 | CTTTAGCCAATTAAAAAATATTTAT |
| | 3UTR(+979+1003) | | | 3UTR(+1033+1057) | |
| 467 | OPA1 H31 | GTAGTATTGTAATTAAATTGCAATA | 485 | OPA1 H31 | GTCCTTTAGCCAATTAAAAAATATT |
| | 3UTR(+982+1006) | | | 3UTR(+1036+1060) | |
| 468 | OPA1 H31 | AAGGTAGTATTGTAATTAAATTGCA | 486 | OPA1 H31 | AATGTCCTTTAGCCAATTAAAAAAT |
| | 3UTR(+985+1009) | | | 3UTR(+1039+1063) | |
| 469 | OPA1 H31 | GTGAAGGTAGTATTGTAATTAAATT | 487 | OPA1 H31 | TTGAATGTCCTTTAGCCAATTAAAA |
| | 3UTR(+988+1012) | | | 3UTR(+1042+1066) | |
| 470 | OPA1 H31 | GTTGTGAAGGTAGTATTGTAATTAA | 488 | OPA1 H31 | TGCTTGAATGTCCTTTAGCCAATTA |
| | 3UTR(+991+1015) | | | 3UTR(+1045+1069) | |
| 471 | OPA1 H31 | AATGTTGTGAAGGTAGTATTGTAAT | 489 | OPA1 H31 | CTTTGCTTGAATGTCCTTTAGCCAA |
| | 3UTR(+994+1018) | | | 3UTR(+1048+1072) | |
| 472 | OPA1 H31 | GAAAATGTTGTGAAGGTAGTATTGT | 490 | OPA1 H31 | TTTCTTTGCTTGAATGTCCTTTAGC |
| | 3UTR(+997+1021) | | | 3UTR(+1051+1075) | |
| 473 | OPA1 H31 | CATGAAAATGTTGTGAAGGTAGTAT | 491 | OPA1 H31 | GCATTTCTTTGCTTGAATGTCCTTT |
| | 3UTR(+1000+1024) | | | 3UTR(+1054+1078) | |
| 474 | OPA1 H31 | ACACATGAAAATGTTGTGAAGGTAG | 492 | OPA1 H31 | AAAGCATTTCTTTGCTTGAATGTCC |
| | 3UTR(+1003+1027) | | | 3UTR(+1057+1081) | |
| 475 | OPA1 H31 | AAAACACATGAAAATGTTGTGAAGG | 493 | OPA1 H31 | AAGAAAGCATTTCTTTGCTTGAATG |
| | 3UTR(+1006+1030) | | | 3UTR(+1060+1084) | |
| 476 | OPA1 H31 | TTTAAAACACATGAAAATGTTGTGA | 494 | OPA1 H31 | GTAAAGAAAGCATTTCTTTGCTTGA |
| | 3UTR(+1009+1033) | | | 3UTR(+1063+1087) | |
| 495 | OPA1 H31 | TAAGTAAAGAAAGCATTTCTTTGCT | 513 | OPA1 H31 | TTTTATTAACAAAGTAAAGGCTTAG |
| | 3UTR(+1066+1090) | | | 3UTR(+1120+1144) | |
| 496 | OPA1 H31 | TTTTAAGTAAAGAAAGCATTTCTTT | 514 | OPA1 H31 | CACTTTTATTAACAAAGTAAAGGCT |
| | 3UTR(+1069+1093) | | | 3UTR(+1123+1147) | |
| 497 | OPA1 H31 | ACATTTTAAGTAAAGAAAGCATTTC | 515 | OPA1 H31 | GGACACTTTTATTAACAAAGTAAAG |
| | 3UTR(+1072+1096) | | | 3UTR(+1126+1150) | |
| 498 | OPA1 H31 | TAGACATTTTAAGTAAAGAAAGCAT | 516 | OPA1 H31 | AATGGACACTTTTATTAACAAAGTA |
| | 3UTR(+1075+1099) | | | 3UTR(+1129+1153) | |
| 499 | OPA1 H31 | AGATAGACATTTTAAGTAAAGAAAG | 517 | OPA1 H31 | CACAATGGACACTTTTATTAACAAA |
| | 3UTR(+1078+1102) | | | 3UTR(+1132+1156) | |
| 500 | OPA1 H31 | ATGAGATAGACATTTTAAGTAAAGA | 518 | OPA1 H31 | TCACACAATGGACACTTTTATTAAC |
| | 3UTR(+1081+1105) | | | 3UTR(+1135+1159) | |
| 501 | OPA1 H31 | CAAATGAGATAGACATTTTAAGTAA | 519 | OPA1 H31 | ACATCACACAATGGACACTTTTATT |
| | 3UTR(+1084+1108) | | | 3UTR(+1138+1162) | |
| 502 | OPA1 H31 | CAGCAAATGAGATAGACATTTTAAG | 520 | OPA1 H31 | AAAACATCACACAATGGACACTTTT |
| | 3UTR(+1087+1111) | | | 3UTR(+1141+1165) | |
| 503 | OPA1 H31 | AGGCAGCAAATGAGATAGACATTTT | 521 | OPA1 H31 | TCAAAAACATCACACAATGGACACT |
| | 3UTR(+1090+1114) | | | 3UTR(+1144+1168) | |
| 504 | OPA1 H31 | AAAAGGCAGCAAATGAGATAGACAT | 522 | OPA1 H31 | AAATCAAAAACATCACACAATGGAC |
| | 3UTR(+1093+1117) | | | 3UTR(+1147+1171) | |
| 505 | OPA1 H31 | GTGAAAAGGCAGCAAATGAGATAGA | 523 | OPA1 H31 | GTAAAATCAAAAACATCACACAATG |
| | 3UTR(+1096+1120) | | | 3UTR(+1150+1174) | |
| 506 | OPA1 H31 | TTAGTGAAAAGGCAGCAAATGAGAT | 524 | OPA1 H31 | ACTGTAAAATCAAAAACATCACACA |
| | 3UTR(+1099+1123) | | | 3UTR(+1153+1177) | |
| 507 | OPA1 H31 | GGCTTAGTGAAAAGGCAGCAAATGA | 525 | OPA1 H31 | CAAACTGTAAAATCAAAAACATCAC |
| | 3UTR(+1102+1126) | | | 3UTR(+1156+1180) | |
| 508 | OPA1 H31 | AAAGGCTTAGTGAAAAGGCAGCAAA | 526 | OPA1 H31 | TAGCAAACTGTAAAATCAAAAACAT |
| | 3UTR(+1105+1129) | | | 3UTR(+1159+1183) | |
| 509 | OPA1 H31 | AGTAAAGGCTTAGTGAAAAGGCAGC | 527 | OPA1 H31 | ATTTAGCAAACTGTAAAATCAAAAA |
| | 3UTR(+1108+1132) | | | 3UTR(+1162+1186) | |
| 510 | OPA1 H31 | CAAAGTAAAGGCTTAGTGAAAAGGC | 528 | OPA1 H31 | AAGATTTAGCAAACTGTAAAATCAA |
| | 3UTR(+1111+1135) | | | 3UTR(+1165+1189) | |
| 511 | OPA1 H31 | TAACAAAGTAAAGGCTTAGTGAAAA | 529 | OPA1 H31 | AATAAGATTTAGCAAACTGTAAAAT |
| | 3UTR(+1114+1138) | | | 3UTR(+1168+1192) | |
| 512 | OPA1 H31 | TATTAACAAAGTAAAGGCTTAGTGA | 530 | OPA1 H31 | GAAAATAAGATTTAGCAAACTGTAA |
| | 3UTR(+1117+1141) | | | 3UTR(+1171+1195) | |
| 531 | OPA1 H31 | CAAGAAAATAAGATTTAGCAAACTG | 549 | OPA1 H31 | ATGTAAAACAATAAAATGGGGAGTA |
| | 3UTR(+1174+1198) | | | 3UTR(+1228+1252) | |
| 532 | OPA1 H31 | CTCCAAGAAAATAAGATTTAGCAAA | 550 | OPA1 H31 | TTGATGTAAAACAATAAAATGGGGA |
| | 3UTR(+1177+1201) | | | 3UTR(+1231+1255) | |
| 533 | OPA1 H31 | CAACTCCAAGAAAATAAGATTTAGC | 551 | OPA1 H31 | GCATTGATGTAAAACAATAAAATGG |
| | 3UTR(+1180+1204) | | | 3UTR(+1234+1258) | |
| 534 | OPA1 H31 | AAGCAACTCCAAGAAAATAAGATTT | 552 | OPA1 H31 | CATGCATTGATGTAAAACAATAAAA |
| | 3UTR(+1183+1207) | | | 3UTR(+1237+1261) | |
| 535 | OPA1 H31 | AAAAAGCAACTCCAAGAAAATAAGA | 553 | OPA1 H31 | AAGCATGCATTGATGTAAAACAATA |
| | 3UTR(+1186+1210) | | | 3UTR(+1240+1264) | |
| 536 | OPA1 H31 | ACCAAAAAGCAACTCCAAGAAAATA | 554 | OPA1 H31 | ACGAAGCATGCATTGATGTAAAACA |
| | 3UTR(+1189+1213) | | | 3UTR(+1243+1267) | |
| 537 | OPA1 H31 | GTTACCAAAAAGCAACTCCAAGAAA | 555 | OPA1 H31 | ACAACGAAGCATGCATTGATGTAAA |
| | 3UTR(+1192+1216) | | | 3UTR(+1246+1270) | |
| 538 | OPA1 H31 | GCTGTTACCAAAAAGCAACTCCAAG | 556 | OPA1 H31 | ATCACAACGAAGCATGCATTGATGT |
| | 3UTR(+1195+1219) | | | 3UTR(+1249+1273) | |
| 539 | OPA1 H31 | GGGGCTGTTACCAAAAAGCAACTCC | 557 | OPA1 H31 | GGGATCACAACGAAGCATGCATTGA |
| | 3UTR(+1198+1222) | | | 3UTR(+1252+1276) | |
| 540 | OPA1 H31 | AATGGGGCTGTTACCAAAAAGCAAC | 558 | OPA1 H31 | TGAGGGATCACAACGAAGCATGCAT |
| | 3UTR(+1201+1225) | | | 3UTR(+1255+1279) | |
| 541 | OPA1 H31 | AGCAATGGGGCTGTTACCAAAAAGC | 559 | OPA1 H31 | TCTTGAGGGATCACAACGAAGCATG |
| | 3UTR(+1204+1228) | | | 3UTR(+1258+1282) | |
| 542 | OPA1 H31 | AGTAGCAATGGGGCTGTTACCAAAA | 560 | OPA1 H31 | ACATCTTGAGGGATCACAACGAAGC |
| | 3UTR(+1207+1231) | | | 3UTR(+1261+1285) | |
| 543 | OPA1 H31 | GGGAGTAGCAATGGGGCTGTTACCA | 561 | OPA1 H31 | GTTACATCTTGAGGGATCACAACGA |
| | 3UTR(+1210+1234) | | | 3UTR(+1264+1288) | |
| 544 | OPA1 H31 | ATGGGGAGTAGCAATGGGGCTGTTA | 562 | OPA1 H31 | AGTGTTACATCTTGAGGGATCACAA |
| | 3UTR(+1213+1237) | | | 3UTR(+1267+1291) | |
| 545 | OPA1 H31 | AAAATGGGGAGTAGCAATGGGGCTG | 563 | OPA1 H31 | CCAAGTGTTACATCTTGAGGGATCA |
| | 3UTR(+1216+1240) | | | 3UTR(+1270+1294) | |
| 546 | OPA1 H31 | AATAAAATGGGGAGTAGCAATGGGG | 564 | OPA1 H31 | ATACCAAGTGTTACATCTTGAGGGA |
| | 3UTR(+1219+1243) | | | 3UTR(+1273+1297) | |
| 547 | OPA1 H31 | AACAATAAAATGGGGAGTAGCAATG | 565 | OPA1 H31 | AGCATACCAAGTGTTACATCTTGAG |
| | 3UTR(+1222+1246) | | | 3UTR(+1276+1300) | |
| 548 | OPA1 H31 | TAAAACAATAAAATGGGGAGTAGCA | 566 | OPA1 H31 | CCGAGCATACCAAGTGTTACATCTT |
| | 3UTR(+1225+1249) | | | 3UTR(+1279+1303) | |
| 567 | OPA1 H31 | CAACCGAGCATACCAAGTGTTACAT | 585 | OPA1 H31 | TATAAAACAAACATACATTGAATTC |
| | 3UTR(+1282+1306) | | | 3UTR(+1336+1360) | |
| 568 | OPA1 H31 | CCTCAACCGAGCATACCAAGTGTTA | 586 | OPA1 H31 | CAGTATAAAACAAACATACATTGAA |
| | 3UTR(+1285+1309) | | | 3UTR(+1339+1363) | |
| 569 | OPA1 H31 | TATCCTCAACCGAGCATACCAAGTG | 587 | OPA1 H31 | AAACAGTATAAAACAAACATACATT |
| | 3UTR(+1288+1312) | | | 3UTR(+1342+1366) | |
| 570 | OPA1 H31 | TCATATCCTCAACCGAGCATACCAA | 588 | OPA1 H31 | ATCAAACAGTATAAAACAAACATAC |
| | 3UTR(+1291+1315) | | | 3UTR(+1345+1369) | |
| 571 | OPA1 H31 | TTTTCATATCCTCAACCGAGCATAC | 589 | OPA1 H31 | CTTATCAAACAGTATAAAACAAACA |
| | 3UTR(+1294+1318) | | | 3UTR(+1348+1372) | |
| 572 | OPA1 H31 | ATTTTTTCATATCCTCAACCGAGCA | 590 | OPA1 H31 | TTTCTTATCAAACAGTATAAAACAA |
| | 3UTR(+1297+1321) | | | 3UTR(+1351+1375) | |
| 573 | OPA1 H31 | AGTATTTTTTCATATCCTCAACCGA | 591 | OPA1 H31 | ACTTTTCTTATCAAACAGTATAAAA |
| | 3UTR(+1300+1324) | | | 3UTR(+1354+1378) | |
| 574 | OPA1 H31 | GGAAGTATTTTTTCATATCCTCAAC | 592 | OPA1 H31 | CCTACTTTTCTTATCAAACAGTATA |
| | 3UTR(+1303+1327) | | | 3UTR(+1357+1381) | |
| 575 | OPA1 H31 | TTCGGAAGTATTTTTTCATATCCTC | 593 | OPA1 H31 | GGACCTACTTTTCTTATCAAACAGT |
| | 3UTR(+1306+1330) | | | 3UTR(+1360+1384) | |
| 576 | OPA1 H31 | GGTTTCGGAAGTATTTTTTCATATC | 594 | OPA1 H31 | GCTGGACCTACTTTTCTTATCAAAC |
| | 3UTR(+1309+1333) | | | 3UTR(+1363+1387) | |
| 577 | OPA1 H31 | CCTGGTTTCGGAAGTATTTTTTCAT | 595 | OPA1 H31 | AAGGCTGGACCTACTTTTCTTATCA |
| | 3UTR(+1312+1336) | | | 3UTR(+1366+1390) | |
| 578 | OPA1 H31 | ATTCCTGGTTTCGGAAGTATTTTTT | 596 | OPA1 H31 | CTTAAGGCTGGACCTACTTTTCTTA |
| | 3UTR(+1315+1339) | | | 3UTR(+1369+1393) | |
| 579 | OPA1 H31 | TGAATTCCTGGTTTCGGAAGTATTT | 597 | OPA1 H31 | CTGCTTAAGGCTGGACCTACTTTTC |
| | 3UTR(+1318+1342) | | | 3UTR(+1372+1396) | |
| | OPA1 H31 | CATTGAATTCCTGGTTTCGGAAGTA | 598 | OPA1 H31 | GTGCTGCTTAAGGCTGGACCTACTT |
| 580 | 3UTR(+1321+1345) | | | 3UTR(+1375+1399) | |
| 581 | OPA1 H31 | ATACATTGAATTCCTGGTTTCGGAA | 599 | OPA1 H31 | TCTGTGCTGCTTAAGGCTGGACCTA |
| | 3UTR(+1324+1348) | | | 3UTR(+1378+1402) | |
| 582 | OPA1 H31 | AACATACATTGAATTCCTGGTTTCG | 600 | OPA1 H31 | GCATCTGTGCTGCTTAAGGCTGGAC |
| | 3UTR(+1327+1351) | | | 3UTR(+1381+1405) | |
| 583 | OPA1 H31 | ACAAACATACATTGAATTCCTGGTT | 601 | OPA1 H31 | AGCGCATCTGTGCTGCTTAAGGCTG |
| | 3UTR(+1330+1354) | | | 3UTR(+1384+1408) | |
| 584 | OPA1 H31 | AAAACAAACATACATTGAATTCCTG | 602 | OPA1 H31 | ACCAGCGCATCTGTGCTGCTTAAGG |
| | 3UTR(+1333+1357) | | | 3UTR(+1387+1411) | |
| 603 | OPA1 H31 | TCTACCAGCGCATCTGTGCTGCTTA | 621 | OPA1 H31 | TATTCACTCCTGTCCCTAGACCTAA |
| | 3UTR(+1390+1414) | | | 3UTR(+1444+1468) | |
| 604 | OPA1 H31 | GCATCTACCAGCGCATCTGTGCTGC | 622 | OPA1 H31 | TTCTATTCACTCCTGTCCCTAGACC |
| | 3UTR(+1393+1417) | | | 3UTR(+1447+1471) | |
| 605 | OPA1 H31 | TATGCATCTACCAGCGCATCTGTGC | 623 | OPA1 H31 | CCTTTCTATTCACTCCTGTCCCTAG |
| | 3UTR(+1396+1420) | | | 3UTR(+1450+1474) | |
| 606 | OPA1 H31 | GACTATGCATCTACCAGCGCATCTG | 624 | OPA1 H31 | CTCCCTTTCTATTCACTCCTGTCCC |
| | 3UTR(+1399+1423) | | | 3UTR(+1453+1477) | |
| | OPA1 H31 | CCTGACTATGCATCTACCAGCGCAT | 625 | OPA1 H31 | CTCCTCCCTTTCTATTCACTCCTGT |
| 607 | 3UTR(+1402+1426) | | | 3UTR(+1456+1480) | |
| 608 | OPA1 H31 | GTTCCTGACTATGCATCTACCAGCG | 626 | OPA1 H31 | GCTCTCCTCCCTTTCTATTCACTCC |
| | 3UTR(+1405+1429) | | | 3UTR(+1459+1483) | |
| 609 | OPA1 H31 | AAAGTTCCTGACTATGCATCTACCA | 627 | OPA1 H31 | AGAGCTCTCCTCCCTTTCTATTCAC |
| | 3UTR(+1408+1432) | | | 3UTR(+1462+1486) | |
| 610 | OPA1 H31 | AAAAAAGTTCCTGACTATGCATCTA | 628 | OPA1 H31 | AATAGAGCTCTCCTCCCTTTCTATT |
| | 3UTR(+1411+1435) | | | 3UTR(+1465+1489) | |
| 611 | OPA1 H31 | ATAAAAAAAGTTCCTGACTATGCAT | 629 | OPA1 H31 | CATAATAGAGCTCTCCTCCCTTTCT |
| | 3UTR(+1414+1438) | | | 3UTR(+1468+1492) | |
| 612 | OPA1 H31 | GAAATAAAAAAAGTTCCTGACTATG | 630 | OPA1 H31 | GAACATAATAGAGCTCTCCTCCCTT |
| | 3UTR(+1417+1441) | | | 3UTR(+1471+1495) | |
| 613 | OPA1 H31 | AAAGAAATAAAAAAAGTTCCTGACT | 631 | OPA1 H31 | ATAGAACATAATAGAGCTCTCCTCC |
| | 3UTR(+1420+1444) | | | 3UTR(+1474+1498) | |
| 614 | OPA1 H31 | CTAAAAGAAATAAAAAAAGTTCCTG | 632 | OPA1 H31 | TGTATAGAACATAATAGAGCTCTCC |
| | 3UTR(+1423+1447) | | | 3UTR(+1477+1501) | |
| 615 | OPA1 H31 | GACCTAAAAGAAATAAAAAAAGTTC | 633 | OPA1 H31 | CTGTGTATAGAACATAATAGAGCTC |
| | 3UTR(+1426+1450) | | | 3UTR(+1480+1504) | |
| 616 | OPA1 H31 | CTAGACCTAAAAGAAATAAAAAAAG | 634 | OPA1 H31 | AATCTGTGTATAGAACATAATAGAG |
| | 3UTR(+1429+1453) | | | 3UTR(+1483+1507) | |
| 617 | OPA1 H31 | TCCCTAGACCTAAAAGAAATAAAAA | 635 | OPA1 H31 | CCTAATCTGTGTATAGAACATAATA |
| | 3UTR(+1432+1456) | | | 3UTR(+1486+1510) | |
| 618 | OPA1 H31 | CTGTCCCTAGACCTAAAAGAAATAA | 636 | OPA1 H31 | TCTCCTAATCTGTGTATAGAACATA |
| | 3UTR(+1435+1459) | | | 3UTR(+1489+1513) | |
| 619 | OPA1 H31 | CTCCTGTCCCTAGACCTAAAAGAAA | 637 | OPA1 H31 | TCATCTCCTAATCTGTGTATAGAAC |
| | 3UTR(+1438+1462) | | | 3UTR(+1492+1516) | |
| 620 | OPA1 H31 | TCACTCCTGTCCCTAGACCTAAAAG | 638 | OPA1 H31 | AGGTCATCTCCTAATCTGTGTATAG |
| | 3UTR(+1441+1465) | | | 3UTR(+1495+1519) | |
| 639 | OPA1 H31 | GTAAGGTCATCTCCTAATCTGTGTA | 657 | OPA1 H31 | AAATATTCATTAACATGCATTAACC |
| | 3UTR(+1498+1522) | | | 3UTR(+1552+1576) | |
| 640 | OPA1 H31 | CCAGTAAGGTCATCTCCTAATCTGT | 658 | OPA1 H31 | CAAAAATATTCATTAACATGCATTA |
| | 3UTR(+1501+1525) | | | 3UTR(+1555+1579) | |
| 641 | OPA1 H31 | TACCCAGTAAGGTCATCTCCTAATC | 659 | OPA1 H31 | CTGCAAAAATATTCATTAACATGCA |
| | 3UTR(+1504+1528) | | | 3UTR(+1558+1582) | |
| 642 | OPA1 H31 | GTGTACCCAGTAAGGTCATCTCCTA | 660 | OPA1 H31 | CAACTGCAAAAATATTCATTAACAT |
| | 3UTR(+1507+1531) | | | 3UTR(+1561+1585) | |
| 643 | OPA1 H31 | GGGGTGTACCCAGTAAGGTCATCTC | 661 | OPA1 H31 | TTACAACTGCAAAAATATTCATTAA |
| | 3UTR(+1510+1534) | | | 3UTR(+1564+1588) | |
| 644 | OPA1 H31 | AGAGGGGTGTACCCAGTAAGGTCAT | 662 | OPA1 H31 | GCTTTACAACTGCAAAAATATTCAT |
| | 3UTR(+1513+1537) | | | 3UTR(+1567+1591) | |
| 645 | OPA1 H31 | GTTAGAGGGGTGTACCCAGTAAGGT | 663 | OPA1 H31 | TATGCTTTACAACTGCAAAAATATT |
| | 3UTR(+1516+1540) | | | 3UTR(+1570+1594) | |
| 646 | OPA1 H31 | CTGGTTAGAGGGGTGTACCCAGTAA | 664 | OPA1 H31 | TGTTATGCTTTACAACTGCAAAAAT |
| | 3UTR(+1519+1543) | | | 3UTR(+1573+1597) | |
| 647 | OPA1 H31 | GCACTGGTTAGAGGGGTGTACCCAG | 665 | OPA1 H31 | AATTGTTATGCTTTACAACTGCAAA |
| | 3UTR(+1522+1546) | | | 3UTR(+1576+1600) | |
| 648 | OPA1 H31 | TAAGCACTGGTTAGAGGGGTGTACC | 666 | OPA1 H31 | TGTAATTGTTATGCTTTACAACTGC |
| | 3UTR(+1525+1549) | | | 3UTR(+1579+1603) | |
| 649 | OPA1 H31 | CTGTAAGCACTGGTTAGAGGGGTGT | 667 | OPA1 H31 | AGTTGTAATTGTTATGCTTTACAAC |
| | 3UTR(+1528+1552) | | | 3UTR(+1582+1606) | |
| 650 | OPA1 H31 | AACCTGTAAGCACTGGTTAGAGGGG | 668 | OPA1 H31 | TGTAGTTGTAATTGTTATGCTTTAC |
| | 3UTR(+1531+1555) | | | 3UTR(+1585+1609) | |
| 651 | OPA1 H31 | ATTAACCTGTAAGCACTGGTTAGAG | 669 | OPA1 H31 | ATGTGTAGTTGTAATTGTTATGCTT |
| | 3UTR(+1534+1558) | | | 3UTR(+1588+1612) | |
| 652 | OPA1 H31 | TGCATTAACCTGTAAGCACTGGTTA | 670 | OPA1 H31 | TAGATGTGTAGTTGTAATTGTTATG |
| | 3UTR(+1537+1561) | | | 3UTR(+1591+1615) | |
| 653 | OPA1 H31 | ACATGCATTAACCTGTAAGCACTGG | 671 | OPA1 H31 | AAATAGATGTGTAGTTGTAATTGTT |
| | 3UTR(+1540+1564) | | | 3UTR(+1594+1618) | |
| 654 | OPA1 H31 | TTAACATGCATTAACCTGTAAGCAC | 672 | OPA1 H31 | TAGAAATAGATGTGTAGTTGTAATT |
| | 3UTR(+1543+1567) | | | 3UTR(+1597+1621) | |
| 655 | OPA1 H31 | TCATTAACATGCATTAACCTGTAAG | 673 | OPA1 H31 | CTTTAGAAATAGATGTGTAGTTGTA |
| | 3UTR(+1546+1570) | | | 3UTR(+1600+1624) | |
| 656 | OPA1 H31 | TATTCATTAACATGCATTAACCTGT | 674 | OPA1 H31 | ATTCTTTAGAAATAGATGTGTAGTT |
| | 3UTR(+1549+1573) | | | 3UTR(+1603+1627) | |
| 675 | OPA1 H31 | TTTATTCTTTAGAAATAGATGTGTA | 693 | OPA1 H31 | CAGCTGAAGGTCTTTCTTTCTATAG |
| | 3UTR(+1606+1630) | | | 3UTR(+1660+1684) | |
| 676 | OPA1 H31 | TGTTTTATTCTTTAGAAATAGATGT | 694 | OPA1 H31 | ATACAGCTGAAGGTCTTTCTTTCTA |
| | 3UTR(+1609+1633) | | | 3UTR(+1663+1687) | |
| 677 | OPA1 H31 | TCCTGTTTTATTCTTTAGAAATAGA | 695 | OPA1 H31 | GAAATACAGCTGAAGGTCTTTCTTT |
| | 3UTR(+1612+1636) | | | 3UTR(+1666+1690) | |
| 678 | OPA1 H31 | TGGTCCTGTTTTATTCTTTAGAAAT | 696 | OPA1 H31 | GTGGAAATACAGCTGAAGGTCTTTC |
| | 3UTR(+1615+1639) | | | 3UTR(+1669+1693) | |
| 679 | OPA1 H31 | ATATGGTCCTGTTTTATTCTTTAGA | 697 | OPA1 H31 | TCTGTGGAAATACAGCTGAAGGTCT |
| | 3UTR(+1618+1642) | | | 3UTR(+1672+1696) | |
| 680 | OPA1 H31 | TAAATATGGTCCTGTTTTATTCTTT | 698 | OPA1 H31 | AAATCTGTGGAAATACAGCTGAAGG |
| | 3UTR(+1621+1645) | | | 3UTR(+1675+1699) | |
| 681 | OPA1 H31 | AAATAAATATGGTCCTGTTTTATTC | 699 | OPA1 H31 | GAGAAATCTGTGGAAATACAGCTGA |
| | 3UTR(+1624+1648) | | | 3UTR(+1678+1702) | |
| 682 | OPA1 H31 | AGTAAATAAATATGGTCCTGTTTTA | 700 | OPA1 H31 | TGGGAGAAATCTGTGGAAATACAGC |
| | 3UTR(+1627+1651) | | | 3UTR(+1681+1705) | |
| 683 | OPA1 H31 | AGAAGTAAATAAATATGGTCCTGTT | 701 | OPA1 H31 | CCTTGGGAGAAATCTGTGGAAATAC |
| | 3UTR(+1630+1654) | | | 3UTR(+1684+1708) | |
| 684 | OPA1 H31 | GACAGAAGTAAATAAATATGGTCCT | 702 | OPA1 H31 | TTTCCTTGGGAGAAATCTGTGGAAA |
| | 3UTR(+1633+1657) | | | 3UTR(+1687+1711) | |
| 685 | OPA1 H31 | GTTGACAGAAGTAAATAAATATGGT | 703 | OPA1 H31 | CCTTTTCCTTGGGAGAAATCTGTGG |
| | 3UTR(+1636+1660) | | | 3UTR(+1690+1714) | |
| 686 | OPA1 H31 | ATAGTTGACAGAAGTAAATAAATAT | 704 | OPA1 H31 | TAGCCTTTTCCTTGGGAGAAATCTG |
| | 3UTR(+1639+1663) | | | 3UTR(+1693+1717) | |
| 687 | OPA1 H31 | TCTATAGTTGACAGAAGTAAATAAA | 705 | OPA1 H31 | TATTAGCCTTTTCCTTGGGAGAAAT |
| | 3UTR(+1642+1666) | | | 3UTR(+1696+1720) | |
| 688 | OPA1 H31 | CTTTCTATAGTTGACAGAAGTAAAT | 706 | OPA1 H31 | TAATATTAGCCTTTTCCTTGGGAGA |
| | 3UTR(+1645+1669) | | | 3UTR(+1699+1723) | |
| 689 | OPA1 H31 | TTTCTTTCTATAGTTGACAGAAGTA | 707 | OPA1 H31 | GACTAATATTAGCCTTTTCCTTGGG |
| | 3UTR(+1648+1672) | | | 3UTR(+1702+1726) | |
| 690 | OPA1 H31 | GTCTTTCTTTCTATAGTTGACAGAA | 708 | OPA1 H31 | AGTGACTAATATTAGCCTTTTCCTT |
| | 3UTR(+1651+1675) | | | 3UTR(+1705+1729) | |
| 691 | OPA1 H31 | AAGGTCTTTCTTTCTATAGTTGACA | 709 | OPA1 H31 | AGTAGTGACTAATATTAGCCTTTTC |
| | 3UTR(+1654+1678) | | | 3UTR(+1708+1732) | |
| 692 | OPA1 H31 | CTGAAGGTCTTTCTTTCTATAGTTG | 710 | OPA1 H31 | AACAGTAGTGACTAATATTAGCCTT |
| | 3UTR(+1657+1681) | | | 3UTR(+1711+1735) | |
| 711 | OPA1 H31 | GATAACAGTAGTGACTAATATTAGC | 729 | OPA1 H31 | CAAAGAAATGAAGATCTCCCTCCAT |
| | 3UTR(+1714+1738) | | | 3UTR(+1768+1792) | |
| 712 | OPA1 H31 | TGTGATAACAGTAGTGACTAATATT | 730 | OPA1 H31 | CCTCAAAGAAATGAAGATCTCCCTC |
| | 3UTR(+1717+1741) | | | 3UTR(+1771+1795) | |
| 713 | OPA1 H31 | GGATGTGATAACAGTAGTGACTAAT | 731 | OPA1 H31 | TCTCCTCAAAGAAATGAAGATCTCC |
| | 3UTR(+1720+1744) | | | 3UTR(+1774+1798) | |
| 714 | OPA1 H31 | AAGGGATGTGATAACAGTAGTGACT | 732 | OPA1 H31 | TGATCTCCTCAAAGAAATGAAGATC |
| | 3UTR(+1723+1747) | | | 3UTR(+1777+1801) | |
| 715 | OPA1 H31 | ACAAAGGGATGTGATAACAGTAGTG | 733 | OPA1 H31 | TACTGATCTCCTCAAAGAAATGAAG |
| | 3UTR(+1726+1750) | | | 3UTR(+1780+1804) | |
| 716 | OPA1 H31 | TATACAAAGGGATGTGATAACAGTA | 734 | OPA1 H31 | CAATACTGATCTCCTCAAAGAAATG |
| | 3UTR(+1729+1753) | | | 3UTR(+1783+1807) | |
| 717 | OPA1 H31 | ACTTATACAAAGGGATGTGATAACA | 735 | OPA1 H31 | TTACAATACTGATCTCCTCAAAGAA |
| | 3UTR(+1732+1756) | | | 3UTR(+1786+1810) | |
| 718 | OPA1 H31 | AAAACTTATACAAAGGGATGTGATA | 736 | OPA1 H31 | ACGTTACAATACTGATCTCCTCAAA |
| | 3UTR(+1735+1759) | | | 3UTR(+1789+1813) | |
| 719 | OPA1 H31 | TTTAAAACTTATACAAAGGGATGTG | 737 | OPA1 H31 | CATACGTTACAATACTGATCTCCTC |
| | 3UTR(+1738+1762) | | | 3UTR(+1792+1816) | |
| 720 | OPA1 H31 | CTTTTTAAAACTTATACAAAGGGAT | 738 | OPA1 H31 | TCACATACGTTACAATACTGATCTC |
| | 3UTR(+1741+1765) | | | 3UTR(+1795+1819) | |
| 721 | OPA1 H31 | TCTCTTTTTAAAACTTATACAAAGG | 739 | OPA1 H31 | TATTCACATACGTTACAATACTGAT |
| | 3UTR(+1744+1768) | | | 3UTR(+1798+1822) | |
| 722 | OPA1 H31 | CCATCTCTTTTTAAAACTTATACAA | 740 | OPA1 H31 | ATCTATTCACATACGTTACAATACT |
| | 3UTR(+1747+1771) | | | 3UTR(+1801+1825) | |
| 723 | OPA1 H31 | CCTCCATCTCTTTTTAAAACTTATA | 741 | OPA1 H31 | ATCATCTATTCACATACGTTACAAT |
| | 3UTR(+1750+1774) | | | 3UTR(+1804+1828) | |
| 724 | OPA1 H31 | CTCCCTCCATCTCTTTTTAAAACTT | 742 | OPA1 H31 | GTTATCATCTATTCACATACGTTAC |
| | 3UTR(+1753+1777) | | | 3UTR(+1807+1831) | |
| 725 | OPA1 H31 | GATCTCCCTCCATCTCTTTTTAAAA | 743 | OPA1 H31 | ATTGTTATCATCTATTCACATACGT |
| | 3UTR(+1756+1780) | | | 3UTR(+1810+1834) | |
| 726 | OPA1 H31 | GAAGATCTCCCTCCATCTCTTTTTA | 744 | OPA1 H31 | TTAATTGTTATCATCTATTCACATA |
| | 3UTR(+1759+1783) | | | 3UTR(+1813+1837) | |
| 727 | OPA1 H31 | AATGAAGATCTCCCTCCATCTCTTT | 745 | OPA1 H31 | ATATTAATTGTTATCATCTATTCAC |
| | 3UTR(+1762+1786) | | | 3UTR(+1816+1840) | |
| 728 | OPA1 H31 | AGAAATGAAGATCTCCCTCCATCTC | 746 | OPA1 H31 | GTAATATTAATTGTTATCATCTATT |
| | 3UTR(+1765+1789) | | | 3UTR(+1819+1843) | |
| 747 | OPA1 H31 | TTAGTAATATTAATTGTTATCATCT | 765 | OPA1 H31 | AAGCCACATTACTGTGGGGCATGGA |
| | 3UTR(+1822+1846) | | | 3UTR(+1876+1900) | |
| 748 | OPA1 H31 | CTTTTAGTAATATTAATTGTTATCA | 766 | OPA1 H31 | AAGAAGCCACATTACTGTGGGGCAT |
| | 3UTR(+1825+1849) | | | 3UTR(+1879+1903) | |
| 749 | OPA1 H31 | GGACTTTTAGTAATATTAATTGTTA | 767 | OPA1 H31 | TGAAAGAAGCCACATTACTGTGGGG |
| | 3UTR(+1828+1852) | | | 3UTR(+1882+1906) | |
| 750 | OPA1 H31 | GTGGGACTTTTAGTAATATTAATTG | 768 | OPA1 H31 | CCATGAAAGAAGCCACATTACTGTG |
| | 3UTR(+1831+1855) | | | 3UTR(+1885+1909) | |
| 751 | OPA1 H31 | CATGTGGGACTTTTAGTAATATTAA | 769 | OPA1 H31 | AACCCATGAAAGAAGCCACATTACT |
| | 3UTR(+1834+1858) | | | 3UTR(+1888+1912) | |
| 752 | OPA1 H31 | TCTCATGTGGGACTTTTAGTAATAT | 770 | OPA1 H31 | AAAAACCCATGAAAGAAGCCACATT |
| | 3UTR(+1837+1861) | | | 3UTR(+1891+1915) | |
| 753 | OPA1 H31 | GACTCTCATGTGGGACTTTTAGTAA | 771 | OPA1 H31 | AAAAAAAACCCATGAAAGAAGCCAC |
| | 3UTR(+1840+1864) | | | 3UTR(+1894+1918) | |
| 754 | OPA1 H31 | CAGGACTCTCATGTGGGACTTTTAG | 772 | OPA1 H31 | AGAAAAAAAAACCCATGAAAGAAGC |
| | 3UTR(+1843+1867) | | | 3UTR(+1897+1921) | |
| 755 | OPA1 H31 | CGTCAGGACTCTCATGTGGGACTTT | 773 | OPA1 H31 | AGAAGAAAAAAAAACCCATGAAAGA |
| | 3UTR(+1846+1870) | | | 3UTR(+1900+1924) | |
| 756 | OPA1 H31 | GGGCGTCAGGACTCTCATGTGGGAC | 774 | OPA1 H31 | AAAAGAAGAAAAAAAAACCCATGAA |
| | 3UTR(+1849+1873) | | | 3UTR(+1903+1927) | |
| 757 | OPA1 H31 | AGAGGGCGTCAGGACTCTCATGTGG | 775 | OPA1 H31 | CTAAAAAGAAGAAAAAAAAACCCAT |
| | 3UTR(+1852+1876) | | | 3UTR(+1906+1930) | |
| 758 | OPA1 H31 | TGGAGAGGGCGTCAGGACTCTCATG | 776 | OPA1 H31 | CAGCTAAAAAGAAGAAAAAAAAACC |
| | 3UTR(+1855+1879) | | | 3UTR(+1909+1933) | |
| 759 | OPA1 H31 | GCATGGAGAGGGCGTCAGGACTCTC | 777 | OPA1 H31 | GATCAGCTAAAAAGAAGAAAAAAAA |
| | 3UTR(+1858+1882) | | | 3UTR(+1912+1936) | |
| 760 | OPA1 H31 | GGGGCATGGAGAGGGCGTCAGGACT | 778 | OPA1 H31 | TGAGATCAGCTAAAAAGAAGAAAAA |
| | 3UTR(+1861+1885) | | | 3UTR(+1915+1939) | |
| 761 | OPA1 H31 | TGTGGGGCATGGAGAGGGCGTCAGG | 779 | OPA1 H31 | GGATGAGATCAGCTAAAAAGAAGAA |
| | 3UTR(+1864+1888) | | | 3UTR(+1918+1942) | |
| 762 | OPA1 H31 | TACTGTGGGGCATGGAGAGGGCGTC | 780 | OPA1 H31 | TTAGGATGAGATCAGCTAAAAAGAA |
| | 3UTR(+1867+1891) | | | 3UTR(+1921+1945) | |
| 763 | OPA1 H31 | CATTACTGTGGGGCATGGAGAGGGC | 781 | OPA1 H31 | TGCTTAGGATGAGATCAGCTAAAAA |
| | 3UTR(+1870+1894) | | | 3UTR(+1924+1948) | |
| 764 | OPA1 H31 | CCACATTACTGTGGGGCATGGAGAG | 782 | OPA1 H31 | GCATGCTTAGGATGAGATCAGCTAA |
| | 3UTR(+1873+1897) | | | 3UTR(+1927+1951) | |
| 783 | OPA1 H31 | AAAGCATGCTTAGGATGAGATCAGC | 801 | OPA1 H31 | ATTTTCTTTCAATAACATCTGCAGT |
| | 3UTR(+1930+1954) | | | 3UTR(+1984+2008) | |
| 784 | OPA1 H31 | AATAAAGCATGCTTAGGATGAGATC | 802 | OPA1 H31 | TTTATTTTCTTTCAATAACATCTGC |
| | 3UTR(+1933+1957) | | | 3UTR(+1987+2011) | |
| 785 | OPA1 H31 | AAAAATAAAGCATGCTTAGGATGAG | 803 | OPA1 H31 | AATTTTATTTTCTTTCAATAACATC |
| | 3UTR(+1936+1960) | | | 3UTR(+1990+2014) | |
| 786 | OPA1 H31 | AGGAAAAATAAAGCATGCTTAGGAT | 804 | OPA1 H31 | CTGAATTTTATTTTCTTTCAATAAC |
| | 3UTR(+1939+1963) | | | 3UTR(+1993+2017) | |
| 787 | OPA1 H31 | TCAAGGAAAAATAAAGCATGCTTAG | 805 | OPA1 H31 | AGACTGAATTTTATTTTCTTTCAAT |
| | 3UTR(+1942+1966) | | | 3UTR(+1996+2020) | |
| 788 | OPA1 H31 | CTTTCAAGGAAAAATAAAGCATGCT | 806 | OPA1 H31 | TTGAGACTGAATTTTATTTTCTTTC |
| | 3UTR(+1945+1969) | | | 3UTR(+1999+2023) | |
| 789 | OPA1 H31 | TAGCTTTCAAGGAAAAATAAAGCAT | 807 | OPA1 H31 | CTCTTGAGACTGAATTTTATTTTCT |
| | 3UTR(+1948+1972) | | | 3UTR(+2002+2026) | |
| 790 | OPA1 H31 | ACCTAGCTTTCAAGGAAAAATAAAG | 808 | OPA1 H31 | TTACTCTTGAGACTGAATTTTATTT |
| | 3UTR(+1951+1975) | | | 3UTR(+2005+2029) | |
| 791 | OPA1 H31 | AATACCTAGCTTTCAAGGAAAAATA | 809 | OPA1 H31 | GGTTTACTCTTGAGACTGAATTTTA |
| | 3UTR(+1954+1978) | | | 3UTR(+2008+2032) | |
| 792 | OPA1 H31 | ATAAATACCTAGCTTTCAAGGAAAA | 810 | OPA1 H31 | CAGGGTTTACTCTTGAGACTGAATT |
| | 3UTR(+1957+1981) | | | 3UTR(+2011+2035) | |
| 793 | OPA1 H31 | TTGATAAATACCTAGCTTTCAAGGA | 811 | OPA1 H31 | ACACAGGGTTTACTCTTGAGACTGA |
| | 3UTR(+1960+1984) | | | 3UTR(+2014+2038) | |
| 794 | OPA1 H31 | CAGTTGATAAATACCTAGCTTTCAA | 812 | OPA1 H31 | AAGACACAGGGTTTACTCTTGAGAC |
| | 3UTR(+1963+1987) | | | 3UTR(+2017+2041) | |
| 795 | OPA1 H31 | CTGCAGTTGATAAATACCTAGCTTT | 813 | OPA1 H31 | CACAAGACACAGGGTTTACTCTTGA |
| | 3UTR(+1966+1990) | | | 3UTR(+2020+2044) | |
| 796 | OPA1 H31 | CATCTGCAGTTGATAAATACCTAGC | 814 | OPA1 H31 | AGACACAAGACACAGGGTTTACTCT |
| | 3UTR(+1969+1993) | | | 3UTR(+2023+2047) | |
| 797 | OPA1 H31 | TAACATCTGCAGTTGATAAATACCT | 815 | OPA1 H31 | TACAGACACAAGACACAGGGTTTAC |
| | 3UTR(+1972+1996) | | | 3UTR(+2026+2050) | |
| 798 | OPA1 H31 | CAATAACATCTGCAGTTGATAAATA | 816 | OPA1 H31 | AACTACAGACACAAGACACAGGGTT |
| | 3UTR(+1975+1999) | | | 3UTR(+2029+2053) | |
| 799 | OPA1 H31 | TTTCAATAACATCTGCAGTTGATAA | 817 | OPA1 H31 | TTGAACTACAGACACAAGACACAGG |
| | 3UTR(+1978+2002) | | | 3UTR(+2032+2056) | |
| 800 | OPA1 H31 | TTCTTTCAATAACATCTGCAGTTGA | 818 | OPA1 H31 | CTTTTGAACTACAGACACAAGACAC |
| | 3UTR(+1981+2005) | | | 3UTR(+2035+2059) | |
| 819 | OPA1 H31 | TGACTTTTGAACTACAGACACAAGA | 837 | OPA1 H31 | TCGAATTTAACTTCTGTATATTTAG |
| | 3UTR(+2038+2062) | | | 3UTR(+2092+2116) | |
| 820 | OPA1 H31 | TTCTGACTTTTGAACTACAGACACA | 838 | OPA1 H31 | AGTTCGAATTTAACTTCTGTATATT |
| | 3UTR(+2041+2065) | | | 3UTR(+2095+2119) | |
| 821 | OPA1 H31 | CATTTCTGACTTTTGAACTACAGAC | 839 | OPA1 H31 | GCTAGTTCGAATTTAACTTCTGTAT |
| | 3UTR(+2044+2068) | | | 3UTR(+2098+2122) | |
| 822 | OPA1 H31 | AATCATTTCTGACTTTTGAACTACA | 840 | OPA1 H31 | GTGGCTAGTTCGAATTTAACTTCTG |
| | 3UTR(+2047+2071) | | | 3UTR(+2101+2125) | |
| 823 | OPA1 H31 | TAGAATCATTTCTGACTTTTGAACT | 841 | OPA1 H31 | TCTGTGGCTAGTTCGAATTTAACTT |
| | 3UTR(+2050+2074) | | | 3UTR(+2104+2128) | |
| 824 | OPA1 H31 | AATTAGAATCATTTCTGACTTTTGA | 842 | OPA1 H31 | GATTCTGTGGCTAGTTCGAATTTAA |
| | 3UTR(+2053+2077) | | | 3UTR(+2107+2131) | |
| 825 | OPA1 H31 | TTAAATTAGAATCATTTCTGACTTT | 843 | OPA1 H31 | AATGATTCTGTGGCTAGTTCGAATT |
| | 3UTR(+2056+2080) | | | 3UTR(+2110+2134) | |
| 826 | OPA1 H31 | TGTTTAAATTAGAATCATTTCTGAC | 844 | OPA1 H31 | ACAAATGATTCTGTGGCTAGTTCGA |
| | 3UTR(+2059+2083) | | | 3UTR(+2113+2137) | |
| 827 | OPA1 H31 | TTTTGTTTAAATTAGAATCATTTCT | 845 | OPA1 H31 | AAAACAAATGATTCTGTGGCTAGTT |
| | 3UTR(+2062+2086) | | | 3UTR(+2116+2140) | |
| 828 | OPA1 H31 | TCTTTTTGTTTAAATTAGAATCATT | 846 | OPA1 H31 | ATAAAAACAAATGATTCTGTGGCTA |
| | 3UTR(+2065+2089) | | | 3UTR(+2119+2143) | |
| 829 | OPA1 H31 | GTATCTTTTTGTTTAAATTAGAATC | 847 | OPA1 H31 | GACATAAAAACAAATGATTCTGTGG |
| | 3UTR(+2068+2092) | | | 3UTR(+2122+2146) | |
| 830 | OPA1 H31 | TTAGTATCTTTTTGTTTAAATTAGA | 848 | OPA1 H31 | TCTGACATAAAAACAAATGATTCTG |
| | 3UTR(+2071+2095) | | | 3UTR(+2125+2149) | |
| 831 | OPA1 H31 | TATTTAGTATCTTTTTGTTTAAATT | 849 | OPA1 H31 | AATTCTGACATAAAAACAAATGATT |
| | 3UTR(+2074+2098) | | | 3UTR(+2128+2152) | |
| 832 | OPA1 H31 | GTATATTTAGTATCTTTTTGTTTAA | 850 | OPA1 H31 | GCAAATTCTGACATAAAAACAAATG |
| | 3UTR(+2077+2101) | | | 3UTR(+2131+2155) | |
| 833 | OPA1 H31 | TCTGTATATTTAGTATCTTTTTGTT | 851 | OPA1 H31 | TTTGCAAATTCTGACATAAAAACAA |
| | 3UTR(+2080+2104) | | | 3UTR(+2134+2158) | |
| 834 | OPA1 H31 | ACTTCTGTATATTTAGTATCTTTTT | 852 | OPA1 H31 | CTCTTTGCAAATTCTGACATAAAAA |
| | 3UTR(+2083+2107) | | | 3UTR(+2137+2161) | |
| 835 | OPA1 H31 | TTAACTTCTGTATATTTAGTATCTT | 853 | OPA1 H31 | CCACTCTTTGCAAATTCTGACATAA |
| | 3UTR(+2086+2110) | | | 3UTR(+2140+2164) | |
| 836 | OPA1 H31 | AATTTAACTTCTGTATATTTAGTAT | 854 | OPA1 H31 | ACTCCACTCTTTGCAAATTCTGACA |
| | 3UTR(+2089+2113) | | | 3UTR(+2143+2167) | |
| 855 | OPA1 H31 | TCCACTCCACTCTTTGCAAATTCTG | 873 | OPA1 H31 | TTAAGTTTGGATATCATCTATTTAC |
| | 3UTR(+2146+2170) | | | 3UTR(+2200+2224) | |
| 856 | OPA1 H31 | TTGTCCACTCCACTCTTTGCAAATT | 874 | OPA1 H31 | AAATTAAGTTTGGATATCATCTATT |
| | 3UTR(+2149+2173) | | | 3UTR(+2203+2227) | |
| 857 | OPA1 H31 | GCTTTGTCCACTCCACTCTTTGCAA | 875 | OPA1 H31 | GCCAAATTAAGTTTGGATATCATCT |
| | 3UTR(+2152+2176) | | | 3UTR(+2206+2230) | |
| 858 | OPA1 H31 | AGAGCTTTGTCCACTCCACTCTTTG | 876 | OPA1 H31 | CTAGCCAAATTAAGTTTGGATATCA |
| | 3UTR(+2155+2179) | | | 3UTR(+2209+2233) | |
| 859 | OPA1 H31 | TACAGAGCTTTGTCCACTCCACTCT | 877 | OPA1 H31 | GTCCTAGCCAAATTAAGTTTGGATA |
| | 3UTR(+2158+2182) | | | 3UTR(+2212+2236) | |
| 860 | OPA1 H31 | CCATACAGAGCTTTGTCCACTCCAC | 878 | OPA1 H31 | GAAGTCCTAGCCAAATTAAGTTTGG |
| | 3UTR(+2161+2185) | | | 3UTR(+2215+2239) | |
| 861 | OPA1 H31 | CTTCCATACAGAGCTTTGTCCACTC | 879 | OPA1 H31 | ATTGAAGTCCTAGCCAAATTAAGTT |
| | 3UTR(+2164+2188) | | | 3UTR(+2218+2242) | |
| 862 | OPA1 H31 | AGTCTTCCATACAGAGCTTTGTCCA | 880 | OPA1 H31 | AAAATTGAAGTCCTAGCCAAATTAA |
| | 3UTR(+2167+2191) | | | 3UTR(+2221+2245) | |
| 863 | OPA1 H31 | TTCAGTCTTCCATACAGAGCTTTGT | 881 | OPA1 H31 | TTTAAAATTGAAGTCCTAGCCAAAT |
| | 3UTR(+2170+2194) | | | 3UTR(+2224+2248) | |
| 864 | OPA1 H31 | TTGTTCAGTCTTCCATACAGAGCTT | 882 | OPA1 H31 | ATTTTTAAAATTGAAGTCCTAGCCA |
| | 3UTR(+2173+2197) | | | 3UTR(+2227+2251) | |
| 865 | OPA1 H31 | CAGTTGTTCAGTCTTCCATACAGAG | 883 | OPA1 H31 | CTGATTTTTAAAATTGAAGTCCTAG |
| | 3UTR(+2176+2200) | | | 3UTR(+2230+2254) | |
| 866 | OPA1 H31 | TTACAGTTGTTCAGTCTTCCATACA | 884 | OPA1 H31 | ACACTGATTTTTAAAATTGAAGTCC |
| | 3UTR(+2179+2203) | | | 3UTR(+2233+2257) | |
| 867 | OPA1 H31 | TATTTACAGTTGTTCAGTCTTCCAT | 885 | OPA1 H31 | GGTACACTGATTTTTAAAATTGAAG |
| | 3UTR(+2182+2206) | | | 3UTR(+2236+2260) | |
| 868 | OPA1 H31 | ATCTATTTACAGTTGTTCAGTCTTC | 886 | OPA1 H31 | CTAGGTACACTGATTTTTAAAATTG |
| | 3UTR(+2185+2209) | | | 3UTR(+2239+2263) | |
| 869 | OPA1 H31 | ATCATCTATTTACAGTIGTTCAGTC | 887 | OPA1 H31 | TGCCTAGGTACACTGATTTTTAAAA |
| | 3UTR(+2188+2212) | | | 3UTR(+2242+2266) | |
| 870 | OPA1 H31 | GATATCATCTATTTACAGTTGTTCA | 888 | OPA1 H31 | CACTGCCTAGGTACACTGATTTTTA |
| | 3UTR(+2191+2215) | | | 3UTR(+2245+2269) | |
| 871 | OPA1 H31 | TTGGATATCATCTATTTACAGTTGT | 889 | OPA1 H31 | GTGCACTGCCTAGGTACACTGATTT |
| | 3UTR(+2194+2218) | | | 3UTR(+2248+2272) | |
| 872 | OPA1 H31 | AGTTTGGATATCATCTATTTACAGT | 890 | OPA1 H31 | GCTGTGCACTGCCTAGGTACACTGA |
| | 3UTR(+2197+2221) | | | 3UTR(+2251+2275) | |
| 891 | OPA1 H31 | CGTGCTGTGCACTGCCTAGGTACAC | 909 | OPA1 H31 | CCCGCAACTATAGCACAGTGGGTTA |
| | 3UTR(+2254+2278) | | | 3UTR(+2308+2332) | |
| 892 | OPA1 H31 | TTTCGTGCTGTGCACTGCCTAGGTA | 910 | OPA1 H31 | CCACCCGCAACTATAGCACAGTGGG |
| | 3UTR(+2257+2281) | | | 3UTR(+2311+2335) | |
| 893 | OPA1 H31 | TTATTTCGTGCTGTGCACTGCCTAG | 911 | OPA1 H31 | GTTCCACCCGCAACTATAGCACAGT |
| | 3UTR(+2260+2284) | | | 3UTR(+2314+2338) | |
| 894 | OPA1 H31 | CACTTATTTCGTGCTGTGCACTGCC | 912 | OPA1 H31 | ACTGTTCCACCCGCAACTATAGCAC |
| | 3UTR(+2263+2287) | | | 3UTR(+2317+2341) | |
| 895 | OPA1 H31 | GGCCACTTATTTCGTGCTGTGCACT | 913 | OPA1 H31 | TTGACTGTTCCACCCGCAACTATAG |
| | 3UTR(+2266+2290) | | | 3UTR(+2320+2344) | |
| 896 | OPA1 H31 | AAGGGCCACTTATTTCGTGCTGTGC | 914 | OPA1 H31 | AGGTTGACTGTTCCACCCGCAACTA |
| | 3UTR(+2269+2293) | | | 3UTR(+2323+2347) | |
| 897 | OPA1 H31 | TGCAAGGGCCACTTATTTCGTGCTG | 915 | OPA1 H31 | GAAAGGTTGACTGTTCCACCCGCAA |
| | 3UTR(+2272+2296) | | | 3UTR(+2326+2350) | |
| 898 | OPA1 H31 | AGCTGCAAGGGCCACTTATTTCGTG | 916 | OPA1 H31 | CTAGAAAGGTTGACTGTTCCACCCG |
| | 3UTR(+2275+2299) | | | 3UTR(+2329+2353) | |
| 899 | OPA1 H31 | GGAAGCTGCAAGGGCCACTTATTTC | 917 | OPA1 H31 | CTACTAGAAAGGTTGACTGTTCCAC |
| | 3UTR(+2278+2302) | | | 3UTR(+2332+2356) | |
| 900 | OPA1 H31 | CGGGGAAGCTGCAAGGGCCACTTAT | 918 | OPA1 H31 | AAACTACTAGAAAGGTTGACTGTTC |
| | 3UTR(+2281+2305) | | | 3UTR(+2335+2359) | |
| 901 | OPA1 H31 | AAACGGGGAAGCTGCAAGGGCCACT | 919 | OPA1 H31 | CATAAACTACTAGAAAGGTTGACTG |
| | 3UTR(+2284+2308) | | | 3UTR(+2338+2362) | |
| 902 | OPA1 H31 | GTTAAACGGGGAAGCTGCAAGGGCC | 920 | OPA1 H31 | TATCATAAACTACTAGAAAGGTTGA |
| | 3UTR(+2287+2311) | | | 3UTR(+2341+2365) | |
| 903 | OPA1 H31 | TGGGTTAAACGGGGAAGCTGCAAGG | 921 | OPA1 H31 | CAATATCATAAACTACTAGAAAGGT |
| | 3UTR(+2290+2314) | | | 3UTR(+2344+2368) | |
| 904 | OPA1 H31 | CAGTGGGTTAAACGGGGAAGCTGCA | 922 | OPA1 H31 | GGGCAATATCATAAACTACTAGAAA |
| | 3UTR(+2293+2317) | | | 3UTR(+2347+2371) | |
| 905 | OPA1 H31 | GCACAGTGGGTTAAACGGGGAAGCT | 923 | OPA1 H31 | AGAGGGCAATATCATAAACTACTAG |
| | 3UTR(+2296+2320) | | | 3UTR(+2350+2374) | |
| 906 | OPA1 H31 | ATAGCACAGTGGGTTAAACGGGGAA | 924 | OPA1 H31 | CAAAGAGGGCAATATCATAAACTAC |
| | 3UTR(+2299+2323) | | | 3UTR(+2353+2377) | |
| 907 | OPA1 H31 | ACTATAGCACAGTGGGTTAAACGGG | 925 | OPA1 H31 | ATACAAAGAGGGCAATATCATAAAC |
| | 3UTR(+2302+2326) | | | 3UTR(+2356+2380) | |
| 908 | OPA1 H31 | GCAACTATAGCACAGTGGGTTAAAC | 926 | OPA1 H31 | GGAATACAAAGAGGGCAATATCATA |
| | 3UTR(+2305+2329) | | | 3UTR(+2359+2383) | |
| 927 | OPA1 H31 | ATGGGAATACAAAGAGGGCAATATC | 945 | OPA1 H31 | CATTTGGAGGCTGAATAATTTGCAG |
| | 3UTR(+2362+2386) | | | 3UTR(+2416+2440) | |
| 928 | OPA1 H31 | AAAATGGGAATACAAAGAGGGCAAT | 946 | OPA1 H31 | TTGCATTTGGAGGCTGAATAATTTG |
| | 3UTR(+2365+2389) | | | 3UTR(+2419+2443) | |
| 929 | OPA1 H31 | TAGAAAATGGGAATACAAAGAGGGC | 947 | OPA1 H31 | CATTTGCATTTGGAGGCTGAATAAT |
| | 3UTR(+2368+2392) | | | 3UTR(+2422+2446) | |
| 930 | OPA1 H31 | CTGTAGAAAATGGGAATACAAAGAG | 948 | OPA1 H31 | ATTCATTTGCATTTGGAGGCTGAAT |
| | 3UTR(+2371+2395) | | | 3UTR(+2425+2449) | |
| 931 | OPA1 H31 | AAACTGTAGAAAATGGGAATACAAA | 949 | OPA1 H31 | ATCATTCATTTGCATTTGGAGGCTG |
| | 3UTR(+2374+2398) | | | 3UTR(+2428+2452) | |
| 932 | OPA1 H31 | AAAAAACTGTAGAAAATGGGAATAC | 950 | OPA1 H31 | TATATCATTCATTTGCATTTGGAGG |
| | 3UTR(+2377+2401) | | | 3UTR(+2431+2455) | |
| 933 | OPA1 H31 | CGGAAAAAACTGTAGAAAATGGGAA | 951 | OPA1 H31 | TTTTATATCATTCATTTGCATTTGG |
| | 3UTR(+2380+2404) | | | 3UTR(+2434+2458) | |
| 934 | OPA1 H31 | CTGCGGAAAAAACTGTAGAAAATGG | 952 | OPA1 H31 | TATTTTTATATCATTCATTTGCATT |
| | 3UTR(+2383+2407) | | | 3UTR(+2437+2461) | |
| 935 | OPA1 H31 | AGTCTGCGGAAAAAACTGTAGAAAA | 953 | OPA1 H31 | ACTTATTTTTATATCATTCATTTGC |
| | 3UTR(+2386+2410) | | | 3UTR(+2440+2464) | |
| 936 | OPA1 H31 | AGAAGTCTGCGGAAAAAACTGTAGA | 954 | OPA1 H31 | CCTACTTATTTTTATATCATTCATT |
| | 3UTR(+2389+2413) | | | 3UTR(+2443+2467) | |
| 937 | OPA1 H31 | GAAAGAAGTCTGCGGAAAAAACTGT | 955 | OPA1 H31 | TTCCCTACTTATTTTTATATCATTC |
| | 3UTR(+2392+2416) | | | 3UTR(+2446+2470) | |
| 938 | OPA1 H31 | GCAGAAAGAAGTCTGCGGAAAAAAC | 956 | OPA1 H31 | ATGTTCCCTACTTATTTTTATATCA |
| | 3UTR(+2395+2419) | | | 3UTR(+2449+2473) | |
| 939 | OPA1 H31 | TTTGCAGAAAGAAGTCTGCGGAAAA | 957 | OPA1 H31 | GCCATGTTCCCTACTTATTTTTATA |
| | 3UTR(+2398+2422) | | | 3UTR(+2452+2476) | |
| 940 | OPA1 H31 | TAATTTGCAGAAAGAAGTCTGCGGA | 958 | OPA1 H31 | TCTGCCATGTTCCCTACTTATTTTT |
| | 3UTR(+2401+2425) | | | 3UTR(+2455+2479) | |
| 941 | OPA1 H31 | GAATAATTTGCAGAAAGAAGTCTGC | 959 | OPA1 H31 | CTCTCTGCCATGTTCCCTACTTATT |
| | 3UTR(+2404+2428) | | | 3UTR(+2458+2482) | |
| 942 | OPA1 H31 | GCTGAATAATTTGCAGAAAGAAGTC | 960 | OPA1 H31 | CCACTCTCTGCCATGTTCCCTACTT |
| | 3UTR(+2407+2431) | | | 3UTR(+2461+2485) | |
| 943 | OPA1 H31 | GAGGCTGAATAATTTGCAGAAAGAA | 961 | OPA1 H31 | GCACCACTCTCTGCCATGTTCCCTA |
| | 3UTR(+2410+2434) | | | 3UTR(+2464+2488) | |
| 944 | OPA1 H31 | TTGGAGGCTGAATAATTTGCAGAAA | 962 | OPA1 H31 | GAAGCACCACTCTCTGCCATGTTCC |
| | 3UTR(+2413+2437) | | | 3UTR(+2467+2491) | |
| 963 | OPA1 H31 | TGGGAAGCACCACTCTCTGCCATGT | 981 | OPA1 H31 | TTTTAAACCTATACTCTGACTCTCA |
| | 3UTR(+2470+2494) | | | 3UTR(+2524+2548) | |
| 964 | OPA1 H31 | GGCTGGGAAGCACCACTCTCTGCCA | 982 | OPA1 H31 | ATCTTTTAAACCTATACTCTGACTC |
| | 3UTR(+2473+2497) | | | 3UTR(+2527+2551) | |
| 965 | OPA1 H31 | TGAGGCTGGGAAGCACCACTCTCTG | 983 | OPA1 H31 | TTTATCTTTTAAACCTATACTCTGA |
| | 3UTR(+2476+2500) | | | 3UTR(+2530+2554) | |
| 966 | OPA1 H31 | TTGTGAGGCTGGGAAGCACCACTCT | 984 | OPA1 H31 | GATTTTATCTTTTAAACCTATACTC |
| | 3UTR(+2479+2503) | | | 3UTR(+2533+2557) | |
| 967 | OPA1 H31 | ACATTGTGAGGCTGGGAAGCACCAC | 985 | OPA1 H31 | AAAGATTTTATCTTTTAAACCTATA |
| | 3UTR(+2482+2506) | | | 3UTR(+2536+2560) | |
| 968 | OPA1 H31 | CCCACATTGTGAGGCTGGGAAGCAC | 986 | OPA1 H31 | ACTAAAGATTTTATCTTTTAAACCT |
| | 3UTR(+2485+2509) | | | 3UTR(+2539+2563) | |
| 969 | OPA1 H31 | ATTCCCACATTGTGAGGCTGGGAAG | 987 | OPA1 H31 | TTAACTAAAGATTTTATCTTTTAAA |
| | 3UTR(+2488+2512) | | | 3UTR(+2542+2566) | |
| 970 | OPA1 H31 | CAAATTCCCACATTGTGAGGCTGGG | 988 | OPA1 H31 | TTATTAACTAAAGATTTTATCTTTT |
| | 3UTR(+2491+2515) | | | 3UTR(+2545+2569) | |
| 971 | OPA1 H31 | TGTCAAATTCCCACATTGTGAGGCT | 989 | OPA1 H31 | AAATTATTAACTAAAGATTTTATCT |
| | 3UTR(+2494+2518) | | | 3UTR(+2548+2572) | |
| 972 | OPA1 H31 | CTATGTCAAATTCCCACATTGTGAG | 990 | OPA1 H31 | ACAAAATTATTAACTAAAGATTTTA |
| | 3UTR(+2497+2521) | | | 3UTR(+2551+2575) | |
| 973 | OPA1 H31 | ATCCTATGTCAAATTCCCACATTGT | 991 | OPA1 H31 | AATACAAAATTATTAACTAAAGATT |
| | 3UTR(+2500+2524) | | | 3UTR(+2554+2578) | |
| 974 | OPA1 H31 | CTCATCCTATGTCAAATTCCCACAT | 992 | OPA1 H31 | ATAAATACAAAATTATTAACTAAAG |
| | 3UTR(+2503+2527) | | | 3UTR(+2557+2581) | |
| 975 | OPA1 H31 | ACTCTCATCCTATGTCAAATTCCCA | 993 | OPA1 H31 | TAAATAAATACAAAATTATTAACTA |
| | 3UTR(+2506+2530) | | | 3UTR(+2560+2584) | |
| 976 | OPA1 H31 | CTGACTCTCATCCTATGTCAAATTC | 994 | OPA1 H31 | GAATAAATAAATACAAAATTATTAA |
| | 3UTR(+2509+2533) | | | 3UTR(+2563+2587) | |
| | OPA1 H31 | ACTCTGACTCTCATCCTATGTCAAA | 995 | OPA1 H31 | CTAGAATAAATAAATACAAAATTAT |
| 977 | 3UTR(+2512+2536) | | | 3UTR(+2566+2590) | |
| 978 | OPA1 H31 | TATACTCTGACTCTCATCCTATGTC | 996 | OPA1 H31 | CATCTAGAATAAATAAATACAAAAT |
| | 3UTR(+2515+2539) | | | 3UTR(+2569+2593) | |
| 979 | OPA1 H31 | ACCTATACTCTGACTCTCATCCTAT | 997 | OPA1 H31 | ATACATCTAGAATAAATAAATACAA |
| | 3UTR(+2518+2542) | | | 3UTR(+2572+2596) | |
| 980 | OPA1 H31 | TAAACCTATACTCTGACTCTCATCC | 998 | OPA1 H31 | TACATACATCTAGAATAAATAAATA |
| | 3UTR(+2521+2545) | | | 3UTR(+2575+2599) | |
| 999 | OPA1 H31 | AGATACATACATCTAGAATAAATAA | 1017 | OPA1 H31 | ACCATTACTTTGATCCCCTTTATTG |
| | 3UTR(+2578+2602) | | | 3UTR(+2632+2656) | |
| 1000 | OPA1 H31 | CTCAGATACATACATCTAGAATAAA | 1018 | OPA1 H31 | AAAACCATTACTTTGATCCCCTTTA |
| | 3UTR(+2581+2605) | | | 3UTR(+2635+2659) | |
| 1001 | OPA1 H31 | TTCCTCAGATACATACATCTAGAAT | 1019 | OPA1 H31 | AGAAAAACCATTACTTTGATCCCCT |
| | 3UTR(+2584+2608) | | | 3UTR(+2638+2662) | |
| 1002 | OPA1 H31 | TCTTTCCTCAGATACATACATCTAG | 1020 | OPA1 H31 | GAGAGAAAAACCATTACTTTGATCC |
| | 3UTR(+2587+2611) | | | 3UTR(+2641+2665) | |
| 1003 | OPA1 H31 | ATTTCTTTCCTCAGATACATACATC | 1021 | OPA1 H31 | ACTGAGAGAAAAACCATTACTTTGA |
| | 3UTR(+2590+2614) | | | 3UTR(+2644+2668) | |
| 1004 | OPA1 H31 | CAGATTTCTTTCCTCAGATACATAC | 1022 | OPA1 H31 | AGAACTGAGAGAAAAACCATTACTT |
| | 3UTR(+2593+2617) | | | 3UTR(+2647+2671) | |
| 1005 | OPA1 H31 | TACCAGATTTCTTTCCTCAGATACA | 1023 | OPA1 H31 | TAGAGAACTGAGAGAAAAACCATTA |
| | 3UTR(+2596+2620) | | | 3UTR(+2650+2674) | |
| 1006 | OPA1 H31 | AAATACCAGATTTCTTTCCTCAGAT | 1024 | OPA1 H31 | GCTTAGAGAACTGAGAGAAAAACCA |
| | 3UTR(+2599+2623) | | | 3UTR(+2653+2677) | |
| 1007 | OPA1 H31 | CAAAAATACCAGATTTCTTTCCTCA | 1025 | OPA1 H31 | CCAGCTTAGAGAACTGAGAGAAAAA |
| | 3UTR(+2602+2626) | | | 3UTR(+2656+2680) | |
| 1008 | OPA1 H31 | AAGCAAAAATACCAGATTTCTTTCC | 1026 | OPA1 H31 | AGACCAGCTTAGAGAACTGAGAGAA |
| | 3UTR(+2605+2629) | | | 3UTR(+2659+2683) | |
| 1009 | OPA1 H31 | GGAAAGCAAAAATACCAGATTTCTT | 1027 | OPA1 H31 | CATAGACCAGCTTAGAGAACTGAGA |
| | 3UTR(+2608+2632) | | | 3UTR(+2662+2686) | |
| 1010 | OPA1 H31 | ATTGGAAAGCAAAAATACCAGATTT | 1028 | OPA1 H31 | TAACATAGACCAGCTTAGAGAACTG |
| | 3UTR(+2611+2635) | | | 3UTR(+2665+2689) | |
| 1011 | OPA1 H31 | TTTATTGGAAAGCAAAAATACCAGA | 1029 | OPA1 H31 | CTATAACATAGACCAGCTTAGAGAA |
| | 3UTR(+2614+2638) | | | 3UTR(+2668+2692) | |
| 1012 | OPA1 H31 | CCCTTTATTGGAAAGCAAAAATACC | 1030 | OPA1 H31 | GAGCTATAACATAGACCAGCTTAGA |
| | 3UTR(+2617+2641) | | | 3UTR(+2671+2695) | |
| 1013 | OPA1 H31 | ATCCCCTTTATTGGAAAGCAAAAAT | 1031 | OPA1 H31 | CTAGAGCTATAACATAGACCAGCTT |
| | 3UTR(+2620+2644) | | | 3UTR(+2674+2698) | |
| 1014 | OPA1 H31 | TTGATCCCCTTTATTGGAAAGCAAA | 1032 | OPA1 H31 | CTGCTAGAGCTATAACATAGACCAG |
| | 3UTR(+2623+2647) | | | 3UTR(+2677+2701) | |
| 1015 | OPA1 H31 | ACTTTGATCCCCTTTATTGGAAAGC | 1033 | OPA1 H31 | ATACTGCTAGAGCTATAACATAGAC |
| | 3UTR(+2626+2650) | | | 3UTR(+2680+2704) | |
| 1016 | OPA1 H31 | ATTACTTTGATCCCCTTTATTGGAA | 1034 | OPA1 H31 | TCCATACTGCTAGAGCTATAACATA |
| | 3UTR(+2629+2653) | | | 3UTR(+2683+2707) | |
| 1035 | OPA1 H31 | ATTTCCATACTGCTAGAGCTATAAC | 1053 | OPA1 H31 | ATCTCAACAACATATAGCCATGATC |
| | 3UTR(+2686+2710) | | | 3UTR(+2740+2764) | |
| 1036 | OPA1 H31 | CACATTTCCATACTGCTAGAGCTAT | 1054 | OPA1 H31 | AATATCTCAACAACATATAGCCATG |
| | 3UTR(+2689+2713) | | | 3UTR(+2743+2767) | |
| 1037 | OPA1 H31 | AAGCACATTTCCATACTGCTAGAGC | 1055 | OPA1 H31 | TCAAATATCTCAACAACATATAGCC |
| | 3UTR(+2692+2716) | | | 3UTR(+2746+2770) | |
| 1038 | OPA1 H31 | TTAAAGCACATTTCCATACTGCTAG | 1056 | OPA1 H31 | GTTTCAAATATCTCAACAACATATA |
| | 3UTR(+2695+2719) | | | 3UTR(+2749+2773) | |
| 1039 | OPA1 H31 | ATTTTAAAGCACATTTCCATACTGC | 1057 | OPA1 H31 | TAAGTTTCAAATATCTCAACAACAT |
| | 3UTR(+2698+2722) | | | 3UTR(+2752+2776) | |
| 1040 | OPA1 H31 | CATATTTTAAAGCACATTTCCATAC | 1058 | OPA1 H31 | AGGTAAGTTTCAAATATCTCAACAA |
| | 3UTR(+2701+2725) | | | 3UTR(+2755+2779) | |
| 1041 | OPA1 H31 | AAGCATATTTTAAAGCACATTTCCA | 1059 | OPA1 H31 | ACAAGGTAAGTTTCAAATATCTCAA |
| | 3UTR(+2704+2728) | | | 3UTR(+2758+2782) | |
| 1042 | OPA1 H31 | GGTAAGCATATTTTAAAGCACATTT | 1060 | OPA1 H31 | AAAACAAGGTAAGTTTCAAATATCT |
| | 3UTR(+2707+2731) | | | 3UTR(+2761+2785) | |
| 1043 | OPA1 H31 | AAAGGTAAGCATATTTTAAAGCACA | 1061 | OPA1 H31 | GTGAAAACAAGGTAAGTTTCAAATA |
| | 3UTR(+2710+2734) | | | 3UTR(+2764+2788) | |
| 1044 | OPA1 H31 | TCAAAAGGTAAGCATATTTTAAAGC | 1062 | OPA1 H31 | CAAGTGAAAACAAGGTAAGTTTCAA |
| | 3UTR(+2713+2737) | | | 3UTR(+2767+2791) | |
| 1045 | OPA1 H31 | CATTCAAAAGGTAAGCATATTTTAA | 1063 | OPA1 H31 | GCACAAGTGAAAACAAGGTAAGTTT |
| | 3UTR(+2716+2740) | | | 3UTR(+2770+2794) | |
| 1046 | OPA1 H31 | GATCATTCAAAAGGTAAGCATATTT | 1064 | OPA1 H31 | AGTGCACAAGTGAAAACAAGGTAAG |
| | 3UTR(+2719+2743) | | | 3UTR(+2773+2797) | |
| 1047 | OPA1 H31 | CATGATCATTCAAAAGGTAAGCATA | 1065 | OPA1 H31 | CACAGTGCACAAGTGAAAACAAGGT |
| | 3UTR(+2722+2746) | | | 3UTR(+2776+2800) | |
| 1048 | OPA1 H31 | AGCCATGATCATTCAAAAGGTAAGC | 1066 | OPA1 H31 | ATTCACAGTGCACAAGTGAAAACAA |
| | 3UTR(+2725+2749) | | | 3UTR(+2779+2803) | |
| 1049 | OPA1 H31 | TATAGCCATGATCATTCAAAAGGTA | 1067 | OPA1 H31 | TTCATTCACAGTGCACAAGTGAAAA |
| | 3UTR(+2728+2752) | | | 3UTR(+2782+2806) | |
| 1050 | OPA1 H31 | ACATATAGCCATGATCATTCAAAAG | 1068 | OPA1 H31 | AAGTTCATTCACAGTGCACAAGTGA |
| | 3UTR(+2731+2755) | | | 3UTR(+2785+2809) | |
| 1051 | OPA1 H31 | ACAACATATAGCCATGATCATTCAA | 1069 | OPA1 H31 | ACAAAGTTCATTCACAGTGCACAAG |
| | 3UTR(+2734+2758) | | | 3UTR(+2788+2812) | |
| 1052 | OPA1 H31 | TCAACAACATATAGCCATGATCATT | 1070 | OPA1 H31 | AATACAAAGTTCATTCACAGTGCAC |
| | 3UTR(+2737+2761) | | | 3UTR(+2791+2815) | |
| 1071 | OPA1 H31 | AATAATACAAAGTTCATTCACAGTG | 1089 | OPA1 H31 | CAGGCAAAATATAAGTTGCAATAAT |
| | 3UTR(+2794+2818) | | | 3UTR(+2848+2872) | |
| 1072 | OPA1 H31 | AAAAATAATACAAAGTTCATTCACA | 1090 | OPA1 H31 | GCTCAGGCAAAATATAAGTTGCAAT |
| | 3UTR(+2797+2821) | | | 3UTR(+2851+2875) | |
| 1073 | OPA1 H31 | TAAAAAAATAATACAAAGTTCATTC | 1091 | OPA1 H31 | CAAGCTCAGGCAAAATATAAGTTGC |
| | 3UTR(+2800+2824) | | | 3UTR(+2854+2878) | |
| 1074 | OPA1 H31 | TTTTAAAAAAATAATACAAAGTTCA | 1092 | OPA1 H31 | GATCAAGCTCAGGCAAAATATAAGT |
| | 3UTR(+2803+2827) | | | 3UTR(+2857+2881) | |
| 1075 | OPA1 H31 | AGGTTTTAAAAAAATAATACAAAGT | 1093 | OPA1 H31 | TTTGATCAAGCTCAGGCAAAATATA |
| | 3UTR(+2806+2830) | | | 3UTR(+2860+2884) | |
| 1076 | OPA1 H31 | TGAAGGTTTTAAAAAAATAATACAA | 1094 | OPA1 H31 | ACCTTTGATCAAGCTCAGGCAAAAT |
| | 3UTR(+2809+2833) | | | 3UTR(+2863+2887) | |
| 1077 | OPA1 H31 | ATGTGAAGGTTTTAAAAAAATAATA | 1095 | OPA1 H31 | ATGACCTTTGATCAAGCTCAGGCAA |
| | 3UTR(+2812+2836) | | | 3UTR(+2866+2890) | |
| 1078 | OPA1 H31 | GTAATGTGAAGGTTTTAAAAAAATA | 1096 | OPA1 H31 | CAAATGACCTTTGATCAAGCTCAGG |
| | 3UTR(+2815+2839) | | | 3UTR(+2869+2893) | |
| 1079 | OPA1 H31 | CACGTAATGTGAAGGTTTTAAAAAA | 1097 | OPA1 H31 | ACACAAATGACCTTTGATCAAGCTC |
| | 3UTR(+2818+2842) | | | 3UTR(+2872+2896) | |
| 1080 | OPA1 H31 | CTACACGTAATGTGAAGGTTTTAAA | 1098 | OPA1 H31 | TCTACACAAATGACCTTTGATCAAG |
| | 3UTR(+2821+2845) | | | 3UTR(+2875+2899) | |
| 1081 | OPA1 H31 | TATCTACACGTAATGTGAAGGTTTT | 1099 | OPA1 H31 | TCATCTACACAAATGACCTTTGATC |
| | 3UTR(+2824+2848) | | | 3UTR(+2878+2902) | |
| 1082 | OPA1 H31 | TAATATCTACACGTAATGTGAAGGT | 1100 | OPA1 H31 | TACTCATCTACACAAATGACCTTTG |
| | 3UTR(+2827+2851) | | | 3UTR(+2881+2905) | |
| 1083 | OPA1 H31 | CAATAATATCTACACGTAATGTGAA | 1101 | OPA1 H31 | AATTACTCATCTACACAAATGACCT |
| | 3UTR(+2830+2854) | | | 3UTR(+2884+2908) | |
| 1084 | OPA1 H31 | TTGCAATAATATCTACACGTAATGT | 1102 | OPA1 H31 | TTTAATTACTCATCTACACAAATGA |
| | 3UTR(+2833+2857) | | | 3UTR(+2887+2911) | |
| 1085 | OPA1 H31 | AAGTTGCAATAATATCTACACGTAA | 1103 | OPA1 H31 | TTTTTTAATTACTCATCTACACAAA |
| | 3UTR(+2836+2860) | | | 3UTR(+2890+2914) | |
| 1086 | OPA1 H31 | TATAAGTTGCAATAATATCTACACG | 1104 | OPA1 H31 | ATATTTTTTAATTACTCATCTACAC |
| | 3UTR(+2839+2863) | | | 3UTR(+2893+2917) | |
| 1087 | OPA1 H31 | AAATATAAGTTGCAATAATATCTAC | 1105 | OPA1 H31 | TAAATATTTTTTAATTACTCATCTA |
| | 3UTR(+2842+2866) | | | 3UTR(+2896+2920) | |
| 1088 | OPA1 H31 | GCAAAATATAAGTTGCAATAATATC | 1106 | OPA1 H31 | ATTTAAATATTTTTTAATTACTCAT |
| | 3UTR(+2845+2869) | | | 3UTR(+2899+2923) | |
| 1107 | OPA1 H31 | GTGATTTAAATATTTTTTAATTACT | 1125 | OPA1 H31 | CTCGTTAAAACAGAAAAAAATTTAA |
| | 3UTR(+2902+2926) | | | 3UTR(+2956+2980) | |
| 1108 | OPA1 H31 | AATGTGATTTAAATATTTTTTAATT | 1126 | OPA1 H31 | TCCCTCGTTAAAACAGAAAAAAATT |
| | 3UTR(+2905+2929) | | | 3UTR(+2959+2983) | |
| 1109 | OPA1 H31 | TATAATGTGATTTAAATATTTTTTA | 1127 | OPA1 H31 | CTTTCCCTCGTTAAAACAGAAAAAA |
| | 3UTR(+2908+2932) | | | 3UTR(+2962+2986) | |
| 1110 | OPA1 H31 | AATTATAATGTGATTTAAATATTTT | 1128 | OPA1 H31 | TCTCTTTCCCTCGTTAAAACAGAAA |
| | 3UTR(+2911+2935) | | | 3UTR(+2965+2989) | |
| 1111 | OPA1 H31 | TAGAATTATAATGTGATTTAAATAT | 1129 | OPA1 H31 | GTTTCTCTTTCCCTCGTTAAAACAG |
| | 3UTR(+2914+2938) | | | 3UTR(+2968+2992) | |
| 1112 | OPA1 H31 | TAATAGAATTATAATGTGATTTAAA | 1130 | OPA1 H31 | CAGGTTTCTCTTTCCCTCGTTAAAA |
| | 3UTR(+2917+2941) | | | 3UTR(+2971+2995) | |
| 1113 | OPA1 H31 | CAATAATAGAATTATAATGTGATTT | 1131 | OPA1 H31 | ATACAGGTTTCTCTTTCCCTCGTTA |
| | 3UTR(+2920+2944) | | | 3UTR(+2974+2998) | |
| 1114 | OPA1 H31 | CTCCAATAATAGAATTATAATGTGA | 1132 | OPA1 H31 | GGTATACAGGTTTCTCTTTCCCTCG |
| | 3UTR(+2923+2947) | | | 3UTR(+2977+3001) | |
| 1115 | OPA1 H31 | GCTCTCCAATAATAGAATTATAATG | 1133 | OPA1 H31 | CTAGGTATACAGGTTTCTCTTTCCC |
| | 3UTR(+2926+2950) | | | 3UTR(+2980+3004) | |
| 1116 | OPA1 H31 | GATGCTCTCCAATAATAGAATTATA | 1134 | OPA1 H31 | ACCCTAGGTATACAGGTTTCTCTTT |
| | 3UTR(+2929+2953) | | | 3UTR(+2983+3007) | |
| 1117 | OPA1 H31 | AAAGATGCTCTCCAATAATAGAATT | 1135 | OPA1 H31 | ATGACCCTAGGTATACAGGTTTCTC |
| | 3UTR(+2932+2956) | | | 3UTR(+2986+3010) | |
| 1118 | OPA1 H31 | TTAAAAGATGCTCTCCAATAATAGA | 1136 | OPA1 H31 | ATAATGACCCTAGGTATACAGGTTT |
| | 3UTR(+2935+2959) | | | 3UTR(+2989+3013) | |
| 1119 | OPA1 H31 | AATTTAAAAGATGCTCTCCAATAAT | 1137 | OPA1 H31 | CAAATAATGACCCTAGGTATACAGG |
| | 3UTR(+2938+2962) | | | 3UTR(+2992+3016) | |
| 1120 | OPA1 H31 | AAAAATTTAAAAGATGCTCTCCAAT | 1138 | OPA1 H31 | GGTCAAATAATGACCCTAGGTATAC |
| | 3UTR(+2941+2965) | | | 3UTR(+2995+3019) | |
| 1121 | OPA1 H31 | GAAAAAAATTTAAAAGATGCTCTCC | 1139 | OPA1 H31 | TGGGGTCAAATAATGACCCTAGGTA |
| | 3UTR(+2944+2968) | | | 3UTR(+2998+3022) | |
| 1122 | OPA1 H31 | ACAGAAAAAAATTTAAAAGATGCTC | 1140 | OPA1 H31 | CTATGGGGTCAAATAATGACCCTAG |
| | 3UTR(+2947+2971) | | | 3UTR(+3001+3025) | |
| 1123 | OPA1 H31 | AAAACAGAAAAAAATTTAAAAGATG | 1141 | OPA1 H31 | ATACTATGGGGTCAAATAATGACCC |
| | 3UTR(+2950+2974) | | | 3UTR(+3004+3028) | |
| 1124 | OPA1 H31 | GTTAAAACAGAAAAAAATTTAAAAG | 1142 | OPA1 H31 | GTTATACTATGGGGTCAAATAATGA |
| | 3UTR(+2953+2977) | | | 3UTR(+3007+3031) | |
| 1143 | OPA1 H31 | CTGGTTATACTATGGGGTCAAATAA | 1161 | OPA1 H31 | TGAAATTCAAGCATTCAGAGAAAAG |
| | 3UTR(+3010+3034) | | | 3UTR(+3064+3088) | |
| 1144 | OPA1 H31 | AATCTGGTTATACTATGGGGTCAAA | 1162 | OPA1 H31 | ATGTGAAATTCAAGCATTCAGAGAA |
| | 3UTR(+3013+3037) | | | 3UTR(+3067+3091) | |
| 1145 | OPA1 H31 | ATGAATCTGGTTATACTATGGGGTC | 1163 | OPA1 H31 | GGCATGTGAAATTCAAGCATTCAGA |
| | 3UTR(+3016+3040) | | | 3UTR(+3070+3094) | |
| 1146 | OPA1 H31 | ACCATGAATCTGGTTATACTATGGG | 1164 | OPA1 H31 | CAAGGCATGTGAAATTCAAGCATTC |
| | 3UTR(+3019+3043) | | | 3UTR(+3073+3097) | |
| 1147 | OPA1 H31 | TAGACCATGAATCTGGTTATACTAT | 1165 | OPA1 H31 | ATGCAAGGCATGTGAAATTCAAGCA |
| | 3UTR(+3022+3046) | | | 3UTR(+3076+3100) | |
| 1148 | OPA1 H31 | TGTTAGACCATGAATCTGGTTATAC | 1166 | OPA1 H31 | GAAATGCAAGGCATGTGAAATTCAA |
| | 3UTR(+3025+3049) | | | 3UTR(+3079+3103) | |
| 1149 | OPA1 H31 | GCTTGTTAGACCATGAATCTGGTTA | 1167 | OPA1 H31 | TGTGAAATGCAAGGCATGTGAAATT |
| | 3UTR(+3028+3052) | | | 3UTR(+3082+3106) | |
| 1150 | OPA1 H31 | AGAGCTTGTTAGACCATGAATCTGG | 1168 | OPA1 H31 | AACTGTGAAATGCAAGGCATGTGAA |
| | 3UTR(+3031+3055) | | | 3UTR(+3085+3109) | |
| 1151 | OPA1 H31 | CTGAGAGCTTGTTAGACCATGAATC | 1169 | OPA1 H31 | TACAACTGTGAAATGCAAGGCATGT |
| | 3UTR(+3034+3058) | | | 3UTR(+3088+3112) | |
| 1152 | OPA1 H31 | ACACTGAGAGCTTGTTAGACCATGA | 1170 | OPA1 H31 | GAGTACAACTGTGAAATGCAAGGCA |
| | 3UTR(+3037+3061) | | | 3UTR(+3091+3115) | |
| 1153 | OPA1 H31 | GCCACACTGAGAGCTTGTTAGACCA | 1171 | OPA1 H31 | ATGGAGTACAACTGTGAAATGCAAG |
| | 3UTR(+3040+3064) | | | 3UTR(+3094+3118) | |
| 1154 | OPA1 H31 | AAAGCCACACTGAGAGCTTGTTAGA | 1172 | OPA1 H31 | ACCATGGAGTACAACTGTGAAATGC |
| | 3UTR(+3043+3067) | | | 3UTR(+3097+3121) | |
| 1155 | OPA1 H31 | AGAAAAGCCACACTGAGAGCTTGTT | 1173 | OPA1 H31 | TTGACCATGGAGTACAACTGTGAAA |
| | 3UTR(+3046+3070) | | | 3UTR(+3100+3124) | |
| 1156 | OPA1 H31 | CAGAGAAAAGCCACACTGAGAGCTT | 1174 | OPA1 H31 | CGGTTGACCATGGAGTACAACTGTG |
| | 3UTR(+3049+3073) | | | 3UTR(+3103+3127) | |
| 1157 | OPA1 H31 | ATTCAGAGAAAAGCCACACTGAGAG | 1175 | OPA1 H31 | CACCGGTTGACCATGGAGTACAACT |
| | 3UTR(+3052+3076) | | | 3UTR(+3106+3130) | |
| 1158 | OPA1 H31 | AGCATTCAGAGAAAAGCCACACTGA | 1176 | OPA1 H31 | AAGCACCGGTTGACCATGGAGTACA |
| | 3UTR(+3055+3079) | | | 3UTR(+3109+3133) | |
| 1159 | OPA1 H31 | TCAAGCATTCAGAGAAAAGCCACAC | 1177 | OPA1 H31 | AAAAAGCACCGGTTGACCATGGAGT |
| | 3UTR(+3058+3082) | | | 3UTR(+3112+3136) | |
| 1160 | OPA1 H31 | AATTCAAGCATTCAGAGAAAAGCCA | 1178 | OPA1 H31 | GAAAAAAAGCACCGGTTGACCATGG |
| | 3UTR(+3061+3085) | | | 3UTR(+3115+3139) | |
| 1179 | OPA1 H31 | TGTGAAAAAAAGCACCGGTTGACCA | 1197 | OPA1 H31 | TTTTTTATATATTTTACCAAGGAAA |
| | 3UTR(+3118+3142) | | | 3UTR(+3172+3196) | |
| 1180 | OPA1 H31 | CGATGTGAAAAAAAGCACCGGTTGA | 1198 | OPA1 H31 | ACCTTTTTTATATATTTTACCAAGG |
| | 3UTR(+3121+3145) | | | 3UTR(+3175+3199) | |
| 1181 | OPA1 H31 | CCACGATGTGAAAAAAAGCACCGGT | 1199 | OPA1 H31 | AAAACCTTTTTTATATATTTTACCA |
| | 3UTR(+3124+3148) | | | 3UTR(+3178+3202) | |
| 1182 | OPA1 H31 | GTACCACGATGTGAAAAAAAGCACC | 1200 | OPA1 H31 | TAGAAAACCTTTTTTATATATTTTA |
| | 3UTR(+3127+3151) | | | 3UTR(+3181+3205) | |
| 1183 | OPA1 H31 | CAAGTACCACGATGTGAAAAAAAGC | 1201 | OPA1 H31 | AATTAGAAAACCTTTTTTATATATT |
| | 3UTR(+3130+3154) | | | 3UTR(+3184+3208) | |
| 1184 | OPA1 H31 | TGACAAGTACCACGATGTGAAAAAA | 1202 | OPA1 H31 | TGAAATTAGAAAACCTTTTTTATAT |
| | 3UTR(+3133+3157) | | | 3UTR(+3187+3211) | |
| 1185 | OPA1 H31 | TTTTGACAAGTACCACGATGTGAAA | 1203 | OPA1 H31 | AAGTGAAATTAGAAAACCTTTTTTA |
| | 3UTR(+3136+3160) | | | 3UTR(+3190+3214) | |
| 1186 | OPA1 H31 | ATGTTTTGACAAGTACCACGATGTG | 1204 | OPA1 H31 | GCAAAGTGAAATTAGAAAACCTTTT |
| | 3UTR(+3139+3163) | | | 3UTR(+3193+3217) | |
| 1187 | OPA1 H31 | AAAATGTTTTGACAAGTACCACGAT | 1205 | OPA1 H31 | GCAGCAAAGTGAAATTAGAAAACCT |
| | 3UTR(+3142+3166) | | | 3UTR(+3196+3220) | |
| 1188 | OPA1 H31 | AACAAAATGTTTTGACAAGTACCAC | 1206 | OPA1 H31 | TTGGCAGCAAAGTGAAATTAGAAAA |
| | 3UTR(+3145+3169) | | | 3UTR(+3199+3223) | |
| 1189 | OPA1 H31 | AATAACAAAATGTTTTGACAAGTAC | 1207 | OPA1 H31 | GCCTTGGCAGCAAAGTGAAATTAGA |
| | 3UTR(+3148+3172) | | | 3UTR(+3202+3226) | |
| 1190 | OPA1 H31 | GAAAATAACAAAATGTTTTGACAAG | 1208 | OPA1 H31 | ACAGCCTTGGCAGCAAAGTGAAATT |
| | 3UTR(+3151+3175) | | | 3UTR(+3205+3229) | |
| 1191 | OPA1 H31 | AAGGAAAATAACAAAATGTTTTGAC | 1209 | OPA1 H31 | ATGACAGCCTTGGCAGCAAAGTGAA |
| | 3UTR(+3154+3178) | | | 3UTR(+3208+3232) | |
| 1192 | OPA1 H31 | ACCAAGGAAAATAACAAAATGTTTT | 1210 | OPA1 H31 | AAAATGACAGCCTTGGCAGCAAAGT |
| | 3UTR(+3157+3181) | | | 3UTR (+3211−24) | |
| 1193 | OPA1 H31 | TTTACCAAGGAAAATAACAAAATGT | 1211 | OPA1 H31 | ATGAAAATGACAGCCTTGGCAGCAA |
| | 3UTR(+3160+3184) | | | 3UTR (−3−27) | |
| 1194 | OPA1 H31 | TATTTTACCAAGGAAAATAACAAAA | 1212 | OPA1 H31 | TTAATGAAAATGACAGCCTTGGCAG |
| | 3UTR(+3163+3187) | | | 3UTR (−6−30) | |
| 1195 | OPA1 H31 | ATATATTTTACCAAGGAAAATAACA | 1213 | OPA1 H31 | GCATTAATGAAAATGACAGCCTTGG |
| | 3UTR(+3166+3190) | | | 3UTR (−9−33) | |
| 1196 | OPA1 H31 | TTTATATATTTTACCAAGGAAAATA | 1214 | OPA1 H31 | GCAGCATTAATGAAAATGACAGCCT |
| | 3UTR(+3169+3193) | | | 3UTR (−12−36) | |
| 1215 | OPA1 H31 | TTGGCAGCATTAATGAAAATGACAG | — | | |
| | 3UTR(−15−39) | | | | |
| 1216 | OPA1 H31 | ATGTTGGCAGCATTAATGAAAATGA | 1237 | OPA1 H31 | GAAATTAAAGTCTCTTCCAGTTCTA |
| | 3UTR(−18−42) | | | 3UTR(−81−105) | |
| 1217 | OPA1 H31 | AACATGTTGGCAGCATTAATGAAAA | 1238 | OPA1 H31 | GATGAAATTAAAGTCTCTTCCAGTT |
| | 3UTR(−21−45) | | | 3UTR(−84−108) | |
| 1218 | OPA1 H31 | ATGAACATGTTGGCAGCATTAATGA | 1239 | OPA1 H31 | GTAGATGAAATTAAAGTCTCTTCCA |
| | 3UTR(−24−48) | | | 3UTR(−87−111) | |
| 1219 | OPA1 H31 | CATATGAACATGTTGGCAGCATTAA | 1240 | OPA1 H31 | ATGGTAGATGAAATTAAAGTCTCTT |
| | 3UTR(−27−51) | | | 3UTR(−90−114) | |
| 1220 | OPA1 H31 | CCTCATATGAACATGTTGGCAGCAT | 1241 | OPA1 H31 | CAGATGGTAGATGAAATTAAAGTCT |
| | 3UTR(−30−54) | | | 3UTR(−93−117) | |
| 1221 | OPA1 H31 | AAGCCTCATATGAACATGTTGGCAG | 1242 | OPA1 H31 | AATCAGATGGTAGATGAAATTAAAG |
| | 3UTR(−33−57) | | | 3UTR(−96−120) | |
| 1222 | OPA1 H31 | AGTAAGCCTCATATGAACATGTTGG | 1243 | OPA1 H31 | TATAATCAGATGGTAGATGAAATTA |
| | 3UTR(−36−60) | | | 3UTR(−99−123) | |
| 1223 | OPA1 H31 | CTTAGTAAGCCTCATATGAACATGT | 1244 | OPA1 H31 | GTTTATAATCAGATGGTAGATGAAA |
| | 3UTR(−39−63) | | | 3UTR(−102−126) | |
| 1224 | OPA1 H31 | CTTCTTAGTAAGCCTCATATGAACA | 1245 | OPA1 H31 | GGAGTTTATAATCAGATGGTAGATG |
| | 3UTR(−42−66) | | | 3UTR(−105−129) | |
| 1225 | OPA1 H31 | TAACTTCTTAGTAAGCCTCATATGA | 1246 | OPA1 H31 | ACAGGAGTTTATAATCAGATGGTAG |
| | 3UTR(−45−69) | | | 3UTR(−108−132) | |
| 1226 | OPA1 H31 | TTATAACTTCTTAGTAAGCCTCATA | 1247 | OPA1 H31 | GTAACAGGAGTTTATAATCAGATGG |
| | 3UTR(−48−72) | | | 3UTR(−111−135) | |
| 1227 | OPA1 H31 | TAGTTATAACTTCTTAGTAAGCCTC | 1248 | OPA1 H31 | TGAGTAACAGGAGTTTATAATCAGA |
| | 3UTR(−51−75) | | | 3UTR(−114−138) | |
| 1228 | OPA1 H31 | GCTTAGTTATAACTTCTTAGTAAGC | 1249 | OPA1 H31 | AAGTGAGTAACAGGAGTTTATAATC |
| | 3UTR(−54−78) | | | 3UTR(−117−141) | |
| 1229 | OPA1 H31 | AAAGCTTAGTTATAACTTCTTAGTA | 1250 | OPA1 H31 | ACAAAGTGAGTAACAGGAGTTTATA |
| | 3UTR(−57−81) | | | 3UTR(−120−144) | |
| 1230 | OPA1 H31 | TCTAAAGCTTAGTTATAACTTCTTA | 1251 | OPA1 H31 | ATAACAAAGTGAGTAACAGGAGTTT |
| | 3UTR(−60−84) | | | 3UTR(−123−147) | |
| 1231 | OPA1 H31 | AGTTCTAAAGCTTAGTTATAACTTC | 1252 | OPA1 H31 | GGAATAACAAAGTGAGTAACAGGAG |
| | 3UTR(−63−87) | | | 3UTR(−126−150) | |
| 1232 | OPA1 H31 | TCCAGTTCTAAAGCTTAGTTATAAC | 1253 | OPA1 H31 | GGAGGAATAACAAAGTGAGTAACAG |
| | 3UTR(−66−90) | | | 3UTR(−129−153) | |
| 1233 | OPA1 H31 | TCTTCCAGTTCTAAAGCTTAGTTAT | 1254 | OPA1 H31 | TCTGGAGGAATAACAAAGTGAGTAA |
| | 3UTR(−69−93) | | | 3UTR(−132−156) | |
| 1234 | OPA1 H31 | GTCTCTTCCAGTTCTAAAGCTTAGT | 1255 | OPA1 H31 | AGTTCTGGAGGAATAACAAAGTGAG |
| | 3UTR(−72−96) | | | 3UTR(−135−159) | |
| 1235 | OPA1 H31 | AAAGTCTCTTCCAGTTCTAAAGCTT | 1256 | OPA1 H31 | CAAAGTTCTGGAGGAATAACAAAGT |
| | 3UTR(−75−99) | | | 3UTR(−138−162) | |
| 1236 | OPA1 H31 | ATTAAAGTCTCTTCCAGTTCTAAAG | 1257 | OPA1 H31 | GAGCAAAGTTCTGGAGGAATAACAA |
| | 3UTR(−78−102) | | | 3UTR(−141−165) | |
| 1258 | OPA1 H31 | TATGAGCAAAGTTCTGGAGGAATAA | 1276 | OPA1 H31 | CTATACGCTACCTAACTTGACATAT |
| | 3UTR(−144−168) | | | 3UTR(−198−222) | |
| 1259 | OPA1 H31 | ATTTATGAGCAAAGTTCTGGAGGAA | 1277 | OPA1 H31 | CACCTATACGCTACCTAACTTGACA |
| | 3UTR(−147−171) | | | 3UTR(−201−225) | |
| 1260 | OPA1 H31 | ATCATTTATGAGCAAAGTTCTGGAG | 1278 | OPA1 H31 | GCACACCTATACGCTACCTAACTTG |
| | 3UTR(−150−174) | | | 3UTR(−204−228) | |
| 1261 | OPA1 H31 | GGTATCATTTATGAGCAAAGTTCTG | 1279 | OPA1 H31 | AAGGCACACCTATACGCTACCTAAC |
| | 3UTR(−153−177) | | | 3UTR(−207−231) | |
| 1262 | OPA1 H31 | GTAGGTATCATTTATGAGCAAAGTT | 1280 | OPA1 H31 | AAGAAGGCACACCTATACGCTACCT |
| | 3UTR(−156−180) | | | 3UTR(−210−234) | |
| 1263 | OPA1 H31 | TTAGTAGGTATCATTTATGAGCAAA | 1281 | OPA1 H31 | ATTAAGAAGGCACACCTATACGCTA |
| | 3UTR(−159−183) | | | 3UTR(−213−237) | |
| 1264 | OPA1 H31 | CAATTAGTAGGTATCATTTATGAGC | 1282 | OPA1 H31 | GGAATTAAGAAGGCACACCTATACG |
| | 3UTR(−162−186) | | | 3UTR(−216−240) | |
| 1265 | OPA1 H31 | CGACAATTAGTAGGTATCATTTATG | 1283 | OPA1 H31 | GAAGGAATTAAGAAGGCACACCTAT |
| | 3UTR(−165−189) | | | 3UTR(−219−243) | |
| 1266 | OPA1 H31 | GATCGACAATTAGTAGGTATCATTT | 1284 | OPA1 H31 | TCTGAAGGAATTAAGAAGGCACACC |
| | 3UTR(−168−192) | | | 3UTR(−222−246) | |
| 1267 | OPA1 H31 | AATGATCGACAATTAGTAGGTATCA | 1285 | OPA1 H31 | TCTTCTGAAGGAATTAAGAAGGCAC |
| | 3UTR(−171−195) | | | 3UTR(−225−249) | |
| 1268 | OPA1 H31 | TCCAATGATCGACAATTAGTAGGTA | 1286 | OPA1 H31 | GCATCTTCTGAAGGAATTAAGAAGG |
| | 3UTR(−174−198) | | | 3UTR(−228−252) | |
| 1269 | OPA1 H31 | ATATCCAATGATCGACAATTAGTAG | 1287 | OPA1 H31 | TCTGCATCTTCTGAAGGAATTAAGA |
| | 3UTR(−177−201) | | | 3UTR(−231−255) | |
| 1270 | OPA1 H31 | GACATATCCAATGATCGACAATTAG | 1288 | OPA1 H31 | GCCTCTGCATCTTCTGAAGGAATTA |
| | 3UTR(−180−204) | | | 3UTR(−234−258) | |
| 1271 | OPA1 H31 | CTTGACATATCCAATGATCGACAAT | 1289 | OPA1 H31 | CTTGCCTCTGCATCTTCTGAAGGAA |
| | 3UTR(−183−207) | | | 3UTR(−237−261) | |
| 1272 | OPA1 H31 | TAACTTGACATATCCAATGATCGAC | 1290 | OPA1 H31 | GTTCTTGCCTCTGCATCTTCTGAAG |
| | 3UTR(−186−210) | | | 3UTR(−240−264) | |
| 1273 | OPA1 H31 | ACCTAACTTGACATATCCAATGATC | 1291 | OPA1 H31 | CATGTTCTTGCCTCTGCATCTTCTG |
| | 3UTR(−189−213) | | | 3UTR(−243−267) | |
| 1274 | OPA1 H31 | GCTACCTAACTTGACATATCCAATG | 1292 | OPA1 H31 | AAACATGTTCTTGCCTCTGCATCTT |
| | 3UTR(−192−216) | | | 3UTR(−246−270) | |
| 1275 | OPA1 H31 | TACGCTACCTAACTTGACATATCCA | 1293 | OPA1 H31 | TTGAAACATGTTCTTGCCTCTGCAT |
| | 3UTR(−195−219) | | | 3UTR(−249−273) | |
| 1294 | OPA1 H31 | CGATTGAAACATGTTCTTGCCTCTG | — | | |
| | 3UTR(−252−276) | | | | |
| 1295 | OPA1 H31 | ACACGATTGAAACATGTTCTTGCCT | 1304 | OPA1 H31 | TAGCACTGATAAAGAAAACCAATGC |
| | 3UTR(−255−279) | | | 3UTR(−282−306) | |
| 1296 | OPA1 H31 | CTAACACGATTGAAACATGTTCTTG | 1305 | OPA1 H31 | TGTTAGCACTGATAAAGAAAACCAA |
| | 3UTR(−258−282) | | | 3UTR(−285−309) | |
| 1297 | OPA1 H31 | ATGCTAACACGATTGAAACATGTTC | 1306 | OPA1 H31 | GTCTGTTAGCACTGATAAAGAAAAC |
| | 3UTR(−261−285) | | | 3UTR(−288−312) | |
| 1298 | OPA1 H31 | CCAATGCTAACACGATTGAAACATG | 1307 | OPA1 H31 | TGAGTCTGTTAGCACTGATAAAGAA |
| | 3UTR(−264−288) | | | 3UTR(−291−315) | |
| 1299 | OPA1 H31 | AAACCAATGCTAACACGATTGAAAC | 1308 | OPA1 H31 | CACTGAGTCTGTTAGCACTGATAAA |
| | 3UTR(−267−291) | | | 3UTR(−294−318) | |
| 1300 | OPA1 H31 | AGAAAACCAATGCTAACACGATTGA | 1309 | OPA1 H31 | TCACACTGAGTCTGTTAGCACTGAT |
| | 3UTR(−270−294) | | | 3UTR(−297−321) | |
| 1301 | OPA1 H31 | TAAAGAAAACCAATGCTAACACGAT | 1310 | OPA1 H31 | GCCTCACACTGAGTCTGTTAGCACT |
| | 3UTR(−273−297) | | | 3UTR(−300−324) | |
| 1302 | OPA1 H31 | TGATAAAGAAAACCAATGCTAACAC | 1311 | OPA1 H31 | GGGGCCTCACACTGAGTCTGTTAGC |
| | 3UTR(−276−300) | | | 3UTR(−303−327) | |
| 1303 | OPA1 H31 | CACTGATAAAGAAAACCAATGCTAA | 1312 | OPA1 H31 | TATGGGGCCTCACACTGAGTCTGTT |
| | 3UTR(−279−303) | | | 3UTR(−306−330) | |

TABLE 5
List of antisense oligonucleotide micro-walked sequences with 17 nucleotides in that target the 3′ UTR of an OPA1 transcript.

| SEQ | | | SEQ | | |
|---|---|---|---|---|---|
| ID | ASO oordinates | Sequence 5′ > 3′ | ID | ASO oordinates | Sequence 5′ > 3′ |
| 1313 | OPA1 H30:31 | ATGAGTACGATTTTAAT | 1319 | OPA1 H31 | ATGTATGCAGAGCTGAT |
| | 3UTR(+1+17) | | | 3UTR(+19+35) | |
| 1314 | OPA1 H30:31 | ATTATGAGTACGATTTT | 1320 | OPA1 H31 | CAGATGTATGCAGAGCT |
| | 3UTR(+4+20) | | | 3UTR(+22+38) | |
| 1315 | OPA1 H31 | CTGATTATGAGTACGAT | 1321 | OPA1 H31 | CTTCAGATGTATGCAGA |
| | 3UTR(+7+23) | | | 3UTR(+25+41) | |
| 1316 | OPA1 H31 | GAGCTGATTATGAGTAC | 1322 | OPA1 H31 | GTTCTTCAGATGTATGC |
| | 3UTR(+10+26) | | | 3UTR(+28+44) | |
| 1317 | OPA1 H31 | GCAGAGCTGATTATGAG | 1323 | OPA1 H31 | TTTGTTCTTCAGATGTA |
| | 3UTR(+13+29) | | | 3UTR(+31+47) | |
| 1318 | OPA1 H31 | TATGCAGAGCTGATTAT | 1324 | OPA1 H31 | GTTTTTGTTCTTCAGAT |
| | 3UTR(+16+32) | | | 3UTR(+34+50) | |
| 1325 | OPA1 H31 | GATGTTTTTGTTCTTCA | 1343 | OPA1 H31 | GTATGTTTAGAAAGGTG |
| | 3UTR(+37+53) | | | 3UTR(+91+107) | |
| 1326 | OPA1 H31 | GTTGATGTTTTTGTTCT | 1344 | OPA1 H31 | ATTGTATGTTTAGAAAG |
| | 3UTR(+40+56) | | | 3UTR(+94+110) | |
| 1327 | OPA1 H31 | GACGTTGATGTTTTTGT | 1345 | OPA1 H31 | TTTATTGTATGTTTAGA |
| | 3UTR(+43+59) | | | 3UTR(+97+113) | |
| 1328 | OPA1 H31 | AAAGACGTTGATGTTTT | 1346 | OPA1 H31 | GACTTTATTGTATGTTT |
| | 3UTR(+46+62) | | | 3UTR(+100+116) | |
| 1329 | OPA1 H31 | ACAAAAGACGTTGATGT | 1347 | OPA1 H31 | CATGACTTTATTGTATG |
| | 3UTR(+49+65) | | | 3UTR(+103+119) | |
| 1330 | OPA1 H31 | TGGACAAAAGACGTTGA | 1348 | OPA1 H31 | TCCCATGACTTTATTGT |
| | 3UTR(+52+68) | | | 3UTR(+106+122) | |
| 1331 | OPA1 H31 | GGCTGGACAAAAGACGT | 1349 | OPA1 H31 | TTATCCCATGACTTTAT |
| | 3UTR(+55+71) | | | 3UTR(+109+125) | |
| 1332 | OPA1 H31 | AGAGGCTGGACAAAAGA | 1350 | OPA1 H31 | TTTTTATCCCATGACTT |
| | 3UTR(+58+74) | | | 3UTR(+112+128) | |
| 1333 | OPA1 H31 | AAAAGAGGCTGGACAAA | 1351 | OPA1 H31 | TTATTTTTATCCCATGA |
| | 3UTR(+61+77) | | | 3UTR(+115+131) | |
| 1334 | OPA1 H31 3UTR(+64+80) | AGAAAAAGAGGCTGGAC | 1352 | OPA1 H31 | CGATTATTTTTATCCCA |
| | | | | 3UTR(+118+134) | |
| 1335 | OPA1 H31 3UTR(+67+83) | AGAAGAAAAAGAGGCTG | 1353 | OPA1 H31 | CATCGATTATTTTTATC |
| | | | | 3UTR(+121+137) | |
| 1336 | OPA1 H31 3UTR(+70+86) | AGCAGAAGAAAAAGAGG | 1354 | OPA1 H31 | ATACATCGATTATTTTT |
| | | | | 3UTR(+124+140) | |
| 1337 | OPA1 H31 3UTR(+73+89) | AACAGCAGAAGAAAAAG | 1355 | OPA1 H31 | AACATACATCGATTATT |
| | | | | 3UTR(+127+143) | |
| 1338 | OPA1 H31 3UTR(+76+92) | TGGAACAGCAGAAGAAA | 1356 | OPA1 H31 | CGTAACATACATCGATT |
| | | | | 3UTR(+130+146) | |
| 1339 | OPA1 H31 3UTR(+79+95) | AGGTGGAACAGCAGAAG | 1357 | OPA1 H31 | GCCCGTAACATACATCG |
| | | | | 3UTR(+133+149) | |
| 1340 | OPA1 H31 3UTR(+82+98) | GAAAGGTGGAACAGCAG | 1358 | OPA1 H31 | AGCGCCCGTAACATACA |
| | | | | 3UTR(+136+152) | |
| 1341 | OPA1 H31 3UTR(+85+101) | TTAGAAAGGTGGAACAG | 1359 | OPA1 H31 | TAAAGCGCCCGTAACAT |
| | | | | 3UTR(+139+155) | |
| 1342 | OPA1 H31 3UTR(+88+104) | TGTTTAGAAAGGTGGAA | 1360 | OPA1 H31 | GGTTAAAGCGCCCGTAA |
| | | | | 3UTR(+142+158) | |
| 1361 | OPA1 H31 | GATGGTTAAAGCGCCCG | 1379 | OPA1 H31 | CAACAAAATAGGATGTT |
| | 3UTR(+145+161) | | | 3UTR(+199+215) | |
| 1362 | OPA1 H31 | GCTGATGGTTAAAGCGC | 1380 | OPA1 H31 | GTACAACAAAATAGGAT |
| | 3UTR(+148+164) | | | 3UTR(+202+218) | |
| 1363 | OPA1 H31 | GCAGCTGATGGTTAAAG | 1381 | OPA1 H31 | TTAGTACAACAAAATAG |
| | 3UTR(+151+167) | | | 3UTR(+205+221) | |
| 1364 | OPA1 H31 | GAGGCAGCTGATGGTTA | 1382 | OPA1 H31 | ACTTTAGTACAACAAAA |
| | 3UTR(+154+170) | | | 3UTR(+208+224) | |
| 1365 | OPA1 H31 | CGAGAGGCAGCTGATGG | 1383 | OPA1 H31 | GTCACTTTAGTACAACA |
| | 3UTR(+157+173) | | | 3UTR(+211+227) | |
| 1366 | OPA1 H31 | ATTCGAGAGGCAGCTGA | 1384 | OPA1 H31 | TTTGTCACTTTAGTACA |
| | 3UTR(+160+176) | | | 3UTR(+214+230) | |
| 1367 | OPA1 H31 | TCCATTCGAGAGGCAGC | 1385 | OPA1 H31 | CGATTTGTCACTTTAGT |
| | 3UTR(+163+179) | | | 3UTR(+217+233) | |
| 1368 | OPA1 H31 | TCTTCCATTCGAGAGGC | 1386 | OPA1 H31 | TTCCGATTTGTCACTTT |
| | 3UTR(+166+182) | | | 3UTR(+220+236) | |
| 1369 | OPA1 H31 | TGTTCTTCCATTCGAGA | 1387 | OPA1 H31 | TTATTCCGATTTGTCAC |
| | 3UTR(+169+185) | | | 3UTR(+223+239) | |
| 1370 | OPA1 H31 | CACTGTTCTTCCATTCG | 1388 | OPA1 H31 | ATATTATTCCGATTTGT |
| | 3UTR(+172+188) | | | 3UTR(+226+242) | |
| 1371 | OPA1 H31 | TACCACTGTTCTTCCAT | 1389 | OPA1 H31 | ATTATATTATTCCGATT |
| | 3UTR(+175+191) | | | 3UTR(+229+245) | |
| 1372 | OPA1 H31 | CATTACCACTGTTCTTC | 1390 | OPA1 H31 | CCAATTATATTATTCCG |
| | 3UTR(+178+194) | | | 3UTR(+232+248) | |
| 1373 | OPA1 H31 | ATCCATTACCACTGTTC | 1391 | OPA1 H31 | ATACCAATTATATTATT |
| | 3UTR(+181+197) | | | 3UTR(+235+251) | |
| 1374 | OPA1 H31 | TTAATCCATTACCACTG | 1392 | OPA1 H31 | GCCATACCAATTATATT |
| | 3UTR(+184+200) | | | 3UTR(+238+254) | |
| 1375 | OPA1 H31 | ATGTTAATCCATTACCA | 1393 | OPA1 H31 | ATGGCCATACCAATTAT |
| | 3UTR(+187+203) | | | 3UTR(+241+257) | |
| 1376 | OPA1 H31 | AGGATGTTAATCCATTA | 1394 | OPA1 H31 | CTAATGGCCATACCAAT |
| | 3UTR(+190+206) | | | 3UTR(+244+260) | |
| 1377 | OPA1 H31 | AATAGGATGTTAATCCA | 1395 | OPA1 H31 | AACCTAATGGCCATACC |
| | 3UTR(+193+209) | | | 3UTR(+247+263) | |
| 1378 | OPA1 H31 | CAAAATAGGATGTTAAT | 1396 | OPA1 H31 | CTGAACCTAATGGCCAT |
| | 3UTR(+196+212) | | | 3UTR(+250+266) | |
| 1397 | OPA1 H31 | GGACTGAACCTAATGGC | 1415 | OPA1 H31 | ACGAGTGCCACCACAAA |
| | 3UTR(+253+269) | | | 3UTR(+307+323) | |
| 1398 | OPA1 H31 | CAAGGACTGAACCTAAT | 1416 | OPA1 H31 | TAAACGAGTGCCACCAC |
| | 3UTR(+256+272) | | | 3UTR(+310+326) | |
| 1399 | OPA1 H31 | CTTCAAGGACTGAACCT | 1417 | OPA1 H31 | CATTAAACGAGTGCCAC |
| | 3UTR(+259+275) | | | 3UTR(+313+329) | |
| 1400 | OPA1 H31 | TATCTTCAAGGACTGAA | 1418 | OPA1 H31 | ATCCATTAAACGAGTGC |
| | 3UTR(+262+278) | | | 3UTR(+316+332) | |
| 1401 | OPA1 H31 | TCTTATCTTCAAGGACT | 1419 | OPA1 H31 | TTAATCCATTAAACGAG |
| | 3UTR(+265+281) | | | 3UTR(+319+335) | |
| 1402 | OPA1 H31 | GTTTCTTATCTTCAAGG | 1420 | OPA1 H31 | CAGTTAATCCATTAAAC |
| | 3UTR(+268+284) | | | 3UTR(+322+338) | |
| 1403 | OPA1 H31 | CAAGTTTCTTATCTTCA | 1421 | OPA1 H31 | CCTCAGTTAATCCATTA |
| | 3UTR(+271+287) | | | 3UTR(+325+341) | |
| 1404 | OPA1 H31 | GAACAAGTTTCTTATCT | 1422 | OPA1 H31 | CAACCTCAGTTAATCCA |
| | 3UTR(+274+290) | | | 3UTR(+328+344) | |
| 1405 | OPA1 H31 | AGAGAACAAGTTTCTTA | 1423 | OPA1 H31 | GAGCAACCTCAGTTAAT |
| | 3UTR(+277+293) | | | 3UTR(+331+347) | |
| 1406 | OPA1 H31 | AACAGAGAACAAGTTTC | 1424 | OPA1 H31 | ATTGAGCAACCTCAGTT |
| | 3UTR(+280+296) | | | 3UTR(+334+350) | |
| 1407 | OPA1 H31 | ACAAACAGAGAACAAGT | 1425 | OPA1 H31 | AACATTGAGCAACCTCA |
| | 3UTR(+283+299) | | | 3UTR(+337+353) | |
| 1408 | OPA1 H31 | ACAACAAACAGAGAACA | 1426 | OPA1 H31 | CTGAACATTGAGCAACC |
| | 3UTR(+286+302) | | | 3UTR(+340+356) | |
| 1409 | OPA1 H31 | AAGACAACAAACAGAGA | 1427 | OPA1 H31 | AAACTGAACATTGAGCA |
| | 3UTR(+289+305) | | | 3UTR(+343+359) | |
| 1410 | OPA1 H31 | AATAAGACAACAAACAG | 1428 | OPA1 H31 | AAGAAACTGAACATTGA |
| | 3UTR(+292+308) | | | 3UTR(+346+362) | |
| 1411 | OPA1 H31 | ACAAATAAGACAACAAA | 1429 | OPA1 H31 | GAAAAGAAACTGAACAT |
| | 3UTR(+295+311) | | | 3UTR(+349+365) | |
| 1412 | OPA1 H31 | ACCACAAATAAGACAAC | 1430 | OPA1 H31 | CTGGAAAAGAAACTGAA |
| | 3UTR(+298+314) | | | 3UTR(+352+368) | |
| 1413 | OPA1 H31 | GCCACCACAAATAAGAC | 1431 | OPA1 H31 | TTTCTGGAAAAGAAACT |
| | 3UTR(+301+317) | | | 3UTR(+355+371) | |
| 1414 | OPA1 H31 | AGTGCCACCACAAATAA | 1432 | OPA1 H31 | GTATTTCTGGAAAAGAA |
| | 3UTR(+304+320) | | | 3UTR(+358+374) | |
| 1433 | OPA1 H31 | ATTGTATTTCTGGAAAA | 1451 | OPA1 H31 | ACAATTGATAACTTTAA |
| | 3UTR(+361+377) | | | 3UTR(+415+431) | |
| 1434 | OPA1 H31 | AGCATTGTATTTCTGGA | 1452 | OPA1 H31 | TATACAATTGATAACTT |
| | 3UTR(+364+380) | | | 3UTR(+418+434) | |
| 1435 | OPA1 H31 | CCTAGCATTGTATTTCT | 1453 | OPA1 H31 | TTATATACAATTGATAA |
| | 3UTR(+367+383) | | | 3UTR(+421+437) | |
| 1436 | OPA1 H31 | ACACCTAGCATTGTATT | 1454 | OPA1 H31 | ATTTTATATACAATTGA |
| | 3UTR(+370+386) | | | 3UTR(+424+440) | |
| 1437 | OPA1 H31 | AAAACACCTAGCATTGT | 1455 | OPA1 H31 | GTGATTTTATATACAAT |
| | 3UTR(+373+389) | | | 3UTR(+427+443) | |
| 1438 | OPA1 H31 | TTCAAAACACCTAGCAT | 1456 | OPA1 H31 | ACTGTGATTTTATATAC |
| | 3UTR(+376+392) | | | 3UTR(+430+446) | |
| 1439 | OPA1 H31 | TATTTCAAAACACCTAG | 1457 | OPA1 H31 | GCTACTGTGATTTTATA |
| | 3UTR(+379+395) | | | 3UTR(+433+449) | |
| 1440 | OPA1 H31 | TTTTATTTCAAAACACC | 1458 | OPA1 H31 | CAGGCTACTGTGATTTT |
| | 3UTR(+382+398) | | | 3UTR(+436+452) | |
| 1441 | OPA1 H31 | AAGTTTTATTTCAAAAC | 1459 | OPA1 H31 | TAGCAGGCTACTGTGAT |
| | 3UTR(+385+401) | | | 3UTR(+439+455) | |
| 1442 | OPA1 H31 | TATAAGTTTTATTTCAA | 1460 | OPA1 H31 | ATTTAGCAGGCTACTGT |
| | 3UTR(+388+404) | | | 3UTR(+442+458) | |
| 1443 | OPA1 H31 | CTATATAAGTTTTATTT | 1461 | OPA1 H31 | ATGATTTAGCAGGCTAC |
| | 3UTR(+391+407) | | | 3UTR(+445+461) | |
| 1444 | OPA1 H31 | TTGCTATATAAGTTTTA | 1462 | OPA1 H31 | ACAATGATTTAGCAGGC |
| | 3UTR(+394+410) | | | 3UTR(+448+464) | |
| 1445 | OPA1 H31 | CAATTGCTATATAAGTT | 1463 | OPA1 H31 | CATACAATGATTTAGCA |
| | 3UTR(+397+413) | | | 3UTR(+451+467) | |
| 1446 | OPA1 H31 | AAACAATTGCTATATAA | 1464 | OPA1 H31 | ACACATACAATGATTTA |
| | 3UTR(+400+416) | | | 3UTR(+454+470) | |
| 1447 | OPA1 H31 | TTTAAACAATTGCTATA | 1465 | OPA1 H31 | CAGACACATACAATGAT |
| | 3UTR(+403+419) | | | 3UTR(+457+473) | |
| 1448 | OPA1 H31 | AACTTTAAACAATTGCT | 1466 | OPA1 H31 | CTACAGACACATACAAT |
| | 3UTR(+406+422) | | | 3UTR(+460+476) | |
| 1449 | OPA1 H31 | GATAACTTTAAACAATT | 1467 | OPA1 H31 | ATACTACAGACACATAC |
| | 3UTR(+409+425) | | | 3UTR(+463+479) | |
| 1450 | OPA1 H31 | ATTGATAACTTTAAACA | 1468 | OPA1 H31 | AGAATACTACAGACACA |
| | 3UTR(+412+428) | | | 3UTR(+466+482) | |
| 1469 | OPA1 H31 | AATAGAATACTACAGAC | 1487 | OPA1 H31 | TTTCTTTCATGTGGTGA |
| | 3UTR(+469+485) | | | 3UTR(+523+539) | |
| 1470 | OPA1 H31 | GGGAATAGAATACTACA | 1488 | OPA1 H31 | ATTTTTCTTTCATGTGG |
| | 3UTR(+472+488) | | | 3UTR(+526+542) | |
| 1471 | OPA1 H31 | TCTGGGAATAGAATACT | 1489 | OPA1 H31 | CCCATTTTTCTTTCATG |
| | 3UTR(+475+491) | | | 3UTR(+529+545) | |
| 1472 | OPA1 H31 | GTTTCTGGGAATAGAAT | 1490 | OPA1 H31 | TTACCCATTTTTCTTTC |
| | 3UTR(+478+494) | | | 3UTR(+532+548) | |
| 1473 | OPA1 H31 | ATAGTTTCTGGGAATAG | 1491 | OPA1 H31 | CTGTTACCCATTTTTCT |
| | 3UTR(+481+497) | | | 3UTR(+535+551) | |
| 1474 | OPA1 H31 | CAAATAGTTTCTGGGAA | 1492 | OPA1 H31 | CTTCTGTTACCCATTTT |
| | 3UTR(+484+500) | | | 3UTR(+538+554) | |
| 1475 | OPA1 H31 | GGTCAAATAGTTTCTGG | 1493 | OPA1 H31 | GTTCTTCTGTTACCCAT |
| | 3UTR(+487+503) | | | 3UTR(+541+557) | |
| 1476 | OPA1 H31 | CATGGTCAAATAGTTTC | 1494 | OPA1 H31 | AGGGTTCTTCTGTTACC |
| | 3UTR(+490+506) | | | 3UTR(+544+560) | |
| 1477 | OPA1 H31 | TATCATGGTCAAATAGT | 1495 | OPA1 H31 | TTAAGGGTTCTTCTGTT |
| | 3UTR(+493+509) | | | 3UTR(+547+563) | |
| 1478 | OPA1 H31 | AATTATCATGGTCAAAT | 1496 | OPA1 H31 | GTTTTAAGGGTTCTTCT |
| | 3UTR(+496+512) | | | 3UTR(+550+566) | |
| 1479 | OPA1 H31 | CTGAATTATCATGGTCA | 1497 | OPA1 H31 | CCTGTTTTAAGGGTTCT |
| | 3UTR(+499+515) | | | 3UTR(+553+569) | |
| 1480 | OPA1 H31 | AAACTGAATTATCATGG | 1498 | OPA1 H31 | TAACCTGTTTTAAGGGT |
| | 3UTR(+502+518) | | | 3UTR(+556+572) | |
| 1481 | OPA1 H31 | TATAAACTGAATTATCA | 1499 | OPA1 H31 | AATTAACCTGTTTTAAG |
| | 3UTR(+505+521) | | | 3UTR(+559+575) | |
| 1482 | OPA1 H31 | GAATATAAACTGAATTA | 1500 | OPA1 H31 | CCAAATTAACCTGTTTT |
| | 3UTR(+508+524) | | | 3UTR(+562+578) | |
| 1483 | OPA1 H31 | GGTGAATATAAACTGAA | 1501 | OPA1 H31 | AATCCAAATTAACCTGT |
| | 3UTR(+511+527) | | | 3UTR(+565+581) | |
| 1484 | OPA1 H31 | TGTGGTGAATATAAACT | 1502 | OPA1 H31 | TACAATCCAAATTAACC |
| | 3UTR(+514+530) | | | 3UTR(+568+584) | |
| 1485 | OPA1 H31 | TCATGTGGTGAATATAA | 1503 | OPA1 H31 | CGTTACAATCCAAATTA |
| | 3UTR(+517+533) | | | 3UTR(+571+587) | |
| 1486 | OPA1 H31 | CTTTCATGTGGTGAATA | 1504 | OPA1 H31 | GAACGTTACAATCCAAA |
| | 3UTR(+520+536) | | | 3UTR(+574+590) | |
| 1505 | OPA1 H31 | ACTGAACGTTACAATCC | 1523 | OPA1 H31 | CTTGGCTTCCAAGGCAA |
| | 3UTR(+577+593) | | | 3UTR(+631+647) | |
| 1506 | OPA1 H31 | TTCACTGAACGTTACAA | 1524 | OPA1 H31 | TGACTTGGCTTCCAAGG |
| | 3UTR(+580+596) | | | 3UTR(+634+650) | |
| 1507 | OPA1 H31 | TCTTTCACTGAACGTTA | 1525 | OPA1 H31 | TACTGACTTGGCTTCCA |
| | 3UTR(+583+599) | | | 3UTR(+637+653) | |
| 1508 | OPA1 H31 | ATTTCTTTCACTGAACG | 1526 | OPA1 H31 | TGGTACTGACTTGGCTT |
| | 3UTR(+586+602) | | | 3UTR(+640+656) | |
| 1509 | OPA1 H31 | GAAATTTCTTTCACTGA | 1527 | OPA1 H31 | AGCTGGTACTGACTTGG |
| | 3UTR(+589+605) | | | 3UTR(+643+659) | |
| 1510 | OPA1 H31 | GTTGAAATTTCTTTCAC | 1528 | OPA1 H31 | GTAAGCTGGTACTGACT |
| | 3UTR(+592+608) | | | 3UTR(+646+662) | |
| 1511 | OPA1 H31 | AGGGTTGAAATTTCTTT | 1529 | OPA1 H31 | TAGGTAAGCTGGTACTG |
| | 3UTR(+595+611) | | | 3UTR(+649+665) | |
| 1512 | OPA1 H31 | TGAAGGGTTGAAATTTC | 1530 | OPA1 H31 | AAATAGGTAAGCTGGTA |
| | 3UTR(+598+614) | | | 3UTR(+652+668) | |
| 1513 | OPA1 H31 | CTATGAAGGGTTGAAAT | 1531 | OPA1 H31 | ATCAAATAGGTAAGCTG |
| | 3UTR(+601+617) | | | 3UTR(+655+671) | |
| 1514 | OPA1 H31 | TGGCTATGAAGGGTTGA | 1532 | OPA1 H31 | TGAATCAAATAGGTAAG |
| | 3UTR(+604+620) | | | 3UTR(+658+674) | |
| 1515 | OPA1 H31 | CGCTGGCTATGAAGGGT | 1533 | OPA1 H31 | AACTGAATCAAATAGGT |
| | 3UTR(+607+623) | | | 3UTR(+661+677) | |
| 1516 | OPA1 H31 | CTTCGCTGGCTATGAAG | 1534 | OPA1 H31 | AGCAACTGAATCAAATA |
| | 3UTR(+610+626) | | | 3UTR(+664+680) | |
| 1517 | OPA1 H31 | TTTCTTCGCTGGCTATG | 1535 | OPA1 H31 | AACAGCAACTGAATCAA |
| | 3UTR(+613+629) | | | 3UTR(+667+683) | |
| 1518 | OPA1 H31 | AAATTTCTTCGCTGGCT | 1536 | OPA1 H31 | GAAAACAGCAACTGAAT |
| | 3UTR(+616+632) | | | 3UTR(+670+686) | |
| 1519 | OPA1 H31 | GGCAAATTTCTTCGCTG | 1537 | OPA1 H31 | TGAGAAAACAGCAACTG |
| | 3UTR(+619+635) | | | 3UTR(+673+689) | |
| 1520 | OPA1 H31 | CAAGGCAAATTTCTTCG | 1538 | OPA1 H31 | GAGTGAGAAAACAGCAA |
| | 3UTR(+622+638) | | | 3UTR(+676+692) | |
| 1521 | OPA1 H31 | TTCCAAGGCAAATTTCT | 1539 | OPA1 H31 | AGAGAGTGAGAAAACAG |
| | 3UTR(+625+641) | | | 3UTR(+679+695) | |
| 1522 | OPA1 H31 | GGCTTCCAAGGCAAATT | 1540 | OPA1 H31 | TATAGAGAGTGAGAAAA |
| | 3UTR(+628+644) | | | 3UTR(+682+698) | |
| 1541 | OPA1 H31 | GGATATAGAGAGTGAGA | 1559 | OPA1 H31 | TTAACAGAAAGCCTAAC |
| | 3UTR(+685+701) | | | 3UTR(+739+755) | |
| 1542 | OPA1 H31 | AATGGATATAGAGAGTG | 1560 | OPA1 H31 | CTATTAACAGAAAGCCT |
| | 3UTR(+688+704) | | | 3UTR(+742+758) | |
| 1543 | OPA1 H31 | TCAAATGGATATAGAGA | 1561 | OPA1 H31 | CCACTATTAACAGAAAG |
| | 3UTR(+691+707) | | | 3UTR(+745+761) | |
| 1544 | OPA1 H31 | ATTTCAAATGGATATAG | 1562 | OPA1 H31 | AAACCACTATTAACAGA |
| | 3UTR(+694+710) | | | 3UTR(+748+764) | |
| 1545 | OPA1 H31 | TCAATTTCAAATGGATA | 1563 | OPA1 H31 | GAAAAACCACTATTAAC |
| | 3UTR(+697+713) | | | 3UTR(+751+767) | |
| 1546 | OPA1 H31 | AAATCAATTTCAAATGG | 1564 | OPA1 H31 | GGAGAAAAACCACTATT |
| | 3UTR(+700+716) | | | 3UTR(+754+770) | |
| 1547 | OPA1 H31 | AATAAATCAATTTCAAA | 1565 | OPA1 H31 | ACAGGAGAAAAACCACT |
| | 3UTR(+703+719) | | | 3UTR(+757+773) | |
| 1548 | OPA1 H31 | TAAAATAAATCAATTTC | 1566 | OPA1 H31 | TCAACAGGAGAAAAACC |
| | 3UTR(+706+722) | | | 3UTR(+760+776) | |
| 1549 | OPA1 H31 | ATCTAAAATAAATCAAT | 1567 | OPA1 H31 | CTGTCAACAGGAGAAAA |
| | 3UTR(+709+725) | | | 3UTR(+763+779) | |
| 1550 | OPA1 H31 | AACATCTAAAATAAATC | 1568 | OPA1 H31 | GCTCTGTCAACAGGAGA |
| | 3UTR(+712+728) | | | 3UTR(+766+782) | |
| 1551 | OPA1 H31 | TACAACATCTAAAATAA | 1569 | OPA1 H31 | GTGGCTCTGTCAACAGG |
| | 3UTR(+715+731) | | | 3UTR(+769+785) | |
| 1552 | OPA1 H31 | GTATACAACATCTAAAA | 1570 | OPA1 H31 | CCGGTGGCTCTGTCAAC |
| | 3UTR(+718+734) | | | 3UTR(+772+788) | |
| 1553 | OPA1 H31 | TAAGTATACAACATCTA | 1571 | OPA1 H31 | AATCCGGTGGCTCTGTC |
| | 3UTR(+721+737) | | | 3UTR(+775+791) | |
| 1554 | OPA1 H31 | ACGTAAGTATACAACAT | 1572 | OPA1 H31 | CATAATCCGGTGGCTCT |
| | 3UTR(+724+740) | | | 3UTR(+778+794) | |
| 1555 | OPA1 H31 | CTAACGTAAGTATACAA | 1573 | OPA1 H31 | TGTCATAATCCGGTGGC |
| | 3UTR(+727+743) | | | 3UTR(+781+797) | |
| 1556 | OPA1 H31 | AGCCTAACGTAAGTATA | 1574 | OPA1 H31 | CTGTGTCATAATCCGGT |
| | 3UTR(+730+746) | | | 3UTR(+784+800) | |
| 1557 | OPA1 H31 | GAAAGCCTAACGTAAGT | 1575 | OPA1 H31 | ATCCTGTGTCATAATCC |
| | 3UTR(+733+749) | | | 3UTR(+787+803) | |
| 1558 | OPA1 H31 | ACAGAAAGCCTAACGTA | 1576 | OPA1 H31 | CTCATCCTGTGTCATAA |
| | 3UTR(+736+752) | | | 3UTR(+790+806) | |
| 1577 | OPA1 H31 | TTCCTCATCCTGTGTCA | 1595 | OPA1 H31 | TTGAAATGTTTGATAAT |
| | 3UTR(+793+809) | | | 3UTR(+847+863) | |
| 1578 | OPA1 H31 | ATCTTCCTCATCCTGTG | 1596 | OPA1 H31 | TAGTTGAAATGTTTGAT |
| | 3UTR(+796+812) | | | 3UTR(+850+866) | |
| 1579 | OPA1 H31 | TTAATCTTCCTCATCCT | 1597 | OPA1 H31 | ACCTAGTTGAAATGTTT |
| | 3UTR(+799+815) | | | 3UTR(+853+869) | |
| 1580 | OPA1 H31 | TCCTTAATCTTCCTCAT | 1598 | OPA1 H31 | GATACCTAGTTGAAATG |
| | 3UTR(+802+818) | | | 3UTR(+856+872) | |
| 1581 | OPA1 H31 | TTATCCTTAATCTTCCT | 1599 | OPA1 H31 | TCTGATACCTAGTTGAA |
| | 3UTR(+805+821) | | | 3UTR(+859+875) | |
| 1582 | OPA1 H31 | TGATTATCCTTAATCTT | 1600 | OPA1 H31 | TTTTCTGATACCTAGTT |
| | 3UTR(+808+824) | | | 3UTR(+862+878) | |
| 1583 | OPA1 H31 | AATTGATTATCCTTAAT | 1601 | OPA1 H31 | CCTTTTTCTGATACCTA |
| | 3UTR(+811+827) | | | 3UTR(+865+881) | |
| 1584 | OPA1 H31 | GTCAATTGATTATCCTT | 1602 | OPA1 H31 | AAGCCTTTTTCTGATAC |
| | 3UTR(+814+830) | | | 3UTR(+868+884) | |
| 1585 | OPA1 H31 | TTAGTCAATTGATTATC | 1603 | OPA1 H31 | AGAAAGCCTTTTTCTGA |
| | 3UTR(+817+833) | | | 3UTR(+871+887) | |
| 1586 | OPA1 H31 | AAATTAGTCAATTGATT | 1604 | OPA1 H31 | GAAAGAAAGCCTTTTTC |
| | 3UTR(+820+836) | | | 3UTR(+874+890) | |
| 1587 | OPA1 H31 | ATGAAATTAGTCAATTG | 1605 | OPA1 H31 | TATGAAAGAAAGCCTTT |
| | 3UTR(+823+839) | | | 3UTR(+877+893) | |
| 1588 | OPA1 H31 | TAAATGAAATTAGTCAA | 1606 | OPA1 H31 | TCTTATGAAAGAAAGCC |
| | 3UTR(+826+842) | | | 3UTR(+880+896) | |
| 1589 | OPA1 H31 | TTCTAAATGAAATTAGT | 1607 | OPA1 H31 | TAGTCTTATGAAAGAAA |
| | 3UTR(+829+845) | | | 3UTR(+883+899) | |
| 1590 | OPA1 H31 | ATATTCTAAATGAAATT | 1608 | OPA1 H31 | AAATAGTCTTATGAAAG |
| | 3UTR(+832+848) | | | 3UTR(+886+902) | |
| 1591 | OPA1 H31 | ATAATATTCTAAATGAA | 1609 | OPA1 H31 | TTAAAATAGTCTTATGA |
| | 3UTR(+835+851) | | | 3UTR(+889+905) | |
| 1592 | OPA1 H31 | TTGATAATATTCTAAAT | 1610 | OPA1 H31 | TATTTAAAATAGTCTTA |
| | 3UTR(+838+854) | | | 3UTR(+892+908) | |
| 1593 | OPA1 H31 | TGTTTGATAATATTCTA | 1611 | OPA1 H31 | TTCTATTTAAAATAGTC |
| | 3UTR(+841+857) | | | 3UTR(+895+911) | |
| 1594 | OPA1 H31 | AAATGTTTGATAATATT | 1612 | OPA1 H31 | AATTTCTATTTAAAATA |
| | 3UTR(+844+860) | | | 3UTR(+898+914) | |
| 1613 | OPA1 H31 | AATAATTTCTATTTAAA | 1631 | OPA1 H31 | AATTTTTCTTTATTCAG |
| | 3UTR(+901+917) | | | 3UTR(+955+971) | |
| 1614 | OPA1 H31 | TGAAATAATTTCTATTT | 1632 | OPA1 H31 | CTAAATTTTTCTTTATT |
| | 3UTR(+904+920) | | | 3UTR(+958+974) | |
| 1615 | OPA1 H31 | TGTTGAAATAATTTCTA | 1633 | OPA1 H31 | GAACTAAATTTTTCTTT |
| | 3UTR(+907+923) | | | 3UTR(+961+977) | |
| 1616 | OPA1 H31 | AATTGTTGAAATAATTT | 1634 | OPA1 H31 | ATTGAACTAAATTTTTC |
| | 3UTR(+910+926) | | | 3UTR(+964+980) | |
| 1617 | OPA1 H31 | TTTAATTGTTGAAATAA | 1635 | OPA1 H31 | TAAATTGAACTAAATTT |
| | 3UTR(+913+929) | | | 3UTR(+967+983) | |
| 1618 | OPA1 H31 | TACTTTAATTGTTGAAA | 1636 | OPA1 H31 | CAATAAATTGAACTAAA |
| | 3UTR(+916+932) | | | 3UTR(+970+986) | |
| 1619 | OPA1 H31 | CATTACTTTAATTGTTG | 1637 | OPA1 H31 | TTGCAATAAATTGAACT |
| | 3UTR(+919+935) | | | 3UTR(+973+989) | |
| 1620 | OPA1 H31 | CAACATTACTTTAATTG | 1638 | OPA1 H31 | AAATTGCAATAAATTGA |
| | 3UTR(+922+938) | | | 3UTR(+976+992) | |
| 1621 | OPA1 H31 | GGTCAACATTACTTTAA | 1639 | OPA1 H31 | ATTAAATTGCAATAAAT |
| | 3UTR(+925+941) | | | 3UTR(+979+995) | |
| 1622 | OPA1 H31 | GATGGTCAACATTACTT | 1640 | OPA1 H31 | GTAATTAAATTGCAATA |
| | 3UTR(+928+944) | | | 3UTR(+982+998) | |
| 1623 | OPA1 H31 | GGGGATGGTCAACATTA | 1641 | OPA1 H31 | ATTGTAATTAAATTGCA |
| | 3UTR(+931+947) | | | 3UTR(+985+1001) | |
| 1624 | OPA1 H31 | GAGGGGGATGGTCAACA | 1642 | OPA1 H31 | AGTATTGTAATTAAATT |
| | 3UTR(+934+950) | | | 3UTR(+988+1004) | |
| 1625 | OPA1 H31 | TGAGAGGGGGATGGTCA | 1643 | OPA1 H31 | GGTAGTATTGTAATTAA |
| | 3UTR(+937+953) | | | 3UTR(+991+1007) | |
| 1626 | OPA1 H31 | AGCTGAGAGGGGGATGG | 1644 | OPA1 H31 | GAAGGTAGTATTGTAAT |
| | 3UTR(+940+956) | | | 3UTR(+994+1010) | |
| 1627 | OPA1 H31 | TTCAGCTGAGAGGGGGA | 1645 | OPA1 H31 | TGTGAAGGTAGTATTGT |
| | 3UTR(+943+959) | | | 3UTR(+997+1013) | |
| 1628 | OPA1 H31 | TTATTCAGCTGAGAGGG | 1646 | OPA1 H31 | TGTTGTGAAGGTAGTAT |
| | 3UTR(+946+962) | | | 3UTR(+1000+1016) | |
| 1629 | OPA1 H31 | TCTTTATTCAGCTGAGA | 1647 | OPA1 H31 | AAATGTTGTGAAGGTAG |
| | 3UTR(+949+965) | | | 3UTR(+1003+1019) | |
| 1630 | OPA1 H31 | TTTTCTTTATTCAGCTG | 1648 | OPA1 H31 | TGAAAATGTTGTGAAGG |
| | 3UTR(+952+968) | | | 3UTR(+1006+1022) | |
| 1649 | OPA1 H31 | ACATGAAAATGTTGTGA | 1667 | OPA1 H31 | AGCATTTCTTTGCTTGA |
| | 3UTR(+1009+1025) | | | 3UTR(+1063+1079) | |
| 1650 | OPA1 H31 | AACACATGAAAATGTTG | 1668 | OPA1 H31 | GAAAGCATTTCTTTGCT |
| | 3UTR(+1012+1028) | | | 3UTR(+1066+1082) | |
| 1651 | OPA1 H31 | TAAAACACATGAAAATG | 1669 | OPA1 H31 | AAAGAAAGCATTTCTTT |
| | 3UTR(+1015+1031) | | | 3UTR(+1069+1085) | |
| 1652 | OPA1 H31 | ATTTAAAACACATGAAA | 1670 | OPA1 H31 | AGTAAAGAAAGCATTTC |
| | 3UTR(+1018+1034) | | | 3UTR(+1072+1088) | |
| 1653 | OPA1 H31 | TTTATTTAAAACACATG | 1671 | OPA1 H31 | TTAAGTAAAGAAAGCAT |
| | 3UTR(+1021+1037) | | | 3UTR(+1075+1091) | |
| 1654 | OPA1 H31 | ATATTTATTTAAAACAC | 1672 | OPA1 H31 | ATTTTAAGTAAAGAAAG |
| | 3UTR(+1024+1040) | | | 3UTR(+1078+1094) | |
| 1655 | OPA1 H31 | AAAATATTTATTTAAAA | 1673 | OPA1 H31 | GACATTTTAAGTAAAGA |
| | 3UTR(+1027+1043) | | | 3UTR(+1081+1097) | |
| 1656 | OPA1 H31 | TAAAAAATATTTATTTA | 1674 | OPA1 H31 | ATAGACATTTTAAGTAA |
| | 3UTR(+1030+1046) | | | 3UTR(+1084+1100) | |
| 1657 | OPA1 H31 | AATTAAAAAATATTTAT | 1675 | OPA1 H31 | GAGATAGACATTTTAAG |
| | 3UTR(+1033+1049) | | | 3UTR(+1087+1103) | |
| 1658 | OPA1 H31 | GCCAATTAAAAAATATT | 1676 | OPA1 H31 | AATGAGATAGACATTTT |
| | 3UTR(+1036+1052) | | | 3UTR(+1090+1106) | |
| 1659 | OPA1 H31 | TTAGCCAATTAAAAAAT | 1677 | OPA1 H31 | GCAAATGAGATAGACAT |
| | 3UTR(+1039+1055) | | | 3UTR(+1093+1109) | |
| 1660 | OPA1 H31 | CCTTTAGCCAATTAAAA | 1678 | OPA1 H31 | GCAGCAAATGAGATAGA |
| | 3UTR(+1042+1058) | | | 3UTR(+1096+1112) | |
| 1661 | OPA1 H31 | TGTCCTTTAGCCAATTA | 1679 | OPA1 H31 | AAGGCAGCAAATGAGAT |
| | 3UTR(+1045+1061) | | | 3UTR(+1099+1115) | |
| 1662 | OPA1 H31 | GAATGTCCTTTAGCCAA | 1680 | OPA1 H31 | GAAAAGGCAGCAAATGA |
| | 3UTR(+1048+1064) | | | 3UTR(+1102+1118) | |
| 1663 | OPA1 H31 | CTTGAATGTCCTTTAGC | 1681 | OPA1 H31 | AGTGAAAAGGCAGCAAA |
| | 3UTR(+1051+1067) | | | 3UTR(+1105+1121) | |
| 1664 | OPA1 H31 | TTGCTTGAATGTCCTTT | 1682 | OPA1 H31 | CTTAGTGAAAAGGCAGC |
| | 3UTR(+1054+1070) | | | 3UTR(+1108+1124) | |
| 1665 | OPA1 H31 | TCTTTGCTTGAATGTCC | 1683 | OPA1 H31 | AGGCTTAGTGAAAAGGC |
| | 3UTR(+1057+1073) | | | 3UTR(+1111+1127) | |
| 1666 | OPA1 H31 | ATTTCTTTGCTTGAATG | 1684 | OPA1 H31 | TAAAGGCTTAGTGAAAA |
| | 3UTR(+1060+1076) | | | 3UTR(+1114+1130) | |
| 1685 | OPA1 H31 | AAGTAAAGGCTTAGTGA | 1703 | OPA1 H31 | GATTTAGCAAACTGTAA |
| | 3UTR(+1117+1133) | | | 3UTR(+1171+1187) | |
| 1686 | OPA1 H31 | ACAAAGTAAAGGCTTAG | 1704 | OPA1 H31 | TAAGATTTAGCAAACTG |
| | 3UTR(+1120+1136) | | | 3UTR(+1174+1190) | |
| 1687 | OPA1 H31 | TTAACAAAGTAAAGGCT | 1705 | OPA1 H31 | AAATAAGATTTAGCAAA |
| | 3UTR(+1123+1139) | | | 3UTR(+1177+1193) | |
| 1688 | OPA1 H31 | TTATTAACAAAGTAAAG | 1706 | OPA1 H31 | AGAAAATAAGATTTAGC |
| | 3UTR(+1126+1142) | | | 3UTR(+1180+1196) | |
| 1689 | OPA1 H31 | CTTTTATTAACAAAGTA | 1707 | OPA1 H31 | CCAAGAAAATAAGATTT |
| | 3UTR(+1129+1145) | | | 3UTR(+1183+1199) | |
| 1690 | OPA1 H31 | ACACTTTTATTAACAAA | 1708 | OPA1 H31 | ACTCCAAGAAAATAAGA |
| | 3UTR(+1132+1148) | | | 3UTR(+1186+1202) | |
| 1691 | OPA1 H31 | TGGACACTTTTATTAAC | 1709 | OPA1 H31 | GCAACTCCAAGAAAATA |
| | 3UTR(+1135+1151) | | | 3UTR(+1189+1205) | |
| 1692 | OPA1 H31 | CAATGGACACTTTTATT | 1710 | OPA1 H31 | AAAGCAACTCCAAGAAA |
| | 3UTR(+1138+1154) | | | 3UTR(+1192+1208) | |
| 1693 | OPA1 H31 | ACACAATGGACACTTTT | 1711 | OPA1 H31 | CAAAAAGCAACTCCAAG |
| | 3UTR(+1141+1157) | | | 3UTR(+1195+1211) | |
| 1694 | OPA1 H31 | ATCACACAATGGACACT | 1712 | OPA1 H31 | TACCAAAAAGCAACTCC |
| | 3UTR(+1144+1160) | | | 3UTR(+1198+1214) | |
| 1695 | OPA1 H31 | AACATCACACAATGGAC | 1713 | OPA1 H31 | TGTTACCAAAAAGCAAC |
| | 3UTR(+1147+1163) | | | 3UTR(+1201+1217) | |
| 1696 | OPA1 H31 | AAAAACATCACACAATG | 1714 | OPA1 H31 | GGCTGTTACCAAAAAGC |
| | 3UTR(+1150+1166) | | | 3UTR(+1204+1220) | |
| 1697 | OPA1 H31 | ATCAAAAACATCACACA | 1715 | OPA1 H31 | TGGGGCTGTTACCAAAA |
| | 3UTR(+1153+1169) | | | 3UTR(+1207+1223) | |
| 1698 | OPA1 H31 | AAAATCAAAAACATCAC | 1716 | OPA1 H31 | CAATGGGGCTGTTACCA |
| | 3UTR(+1156+1172) | | | 3UTR(+1210+1226) | |
| 1699 | OPA1 H31 | TGTAAAATCAAAAACAT | 1717 | OPA1 H31 | TAGCAATGGGGCTGTTA |
| | 3UTR(+1159+1175) | | | 3UTR(+1213+1229) | |
| 1700 | OPA1 H31 | AACTGTAAAATCAAAAA | 1718 | OPA1 H31 | GAGTAGCAATGGGGCTG |
| | 3UTR(+1162+1178) | | | 3UTR(+1216+1232) | |
| 1701 | OPA1 H31 | GCAAACTGTAAAATCAA | 1719 | OPA1 H31 | GGGGAGTAGCAATGGGG |
| | 3UTR(+1165+1181) | | | 3UTR(+1219+1235) | |
| 1702 | OPA1 H31 | TTAGCAAACTGTAAAAT | 1720 | OPA1 H31 | AATGGGGAGTAGCAATG |
| | 3UTR(+1168+1184) | | | 3UTR(+1222+1238) | |
| 1721 | OPA1 H31 | TAAAATGGGGAGTAGCA | 1739 | OPA1 H31 | ACCAAGTGTTACATCTT |
| | 3UTR(+1225+1241) | | | 3UTR(+1279+1295) | |
| 1722 | OPA1 H31 | CAATAAAATGGGGAGTA | 1740 | OPA1 H31 | CATACCAAGTGTTACAT |
| | 3UTR(+1228+1244) | | | 3UTR(+1282+1298) | |
| 1723 | OPA1 H31 | AAACAATAAAATGGGGA | 1741 | OPA1 H31 | GAGCATACCAAGTGTTA |
| | 3UTR(+1231+1247) | | | 3UTR(+1285+1301) | |
| 1724 | OPA1 H31 | GTAAAACAATAAAATGG | 1742 | OPA1 H31 | ACCGAGCATACCAAGTG |
| | 3UTR(+1234+1250) | | | 3UTR(+1288+1304) | |
| 1725 | OPA1 H31 | GATGTAAAACAATAAAA | 1743 | OPA1 H31 | TCAACCGAGCATACCAA |
| | 3UTR(+1237+1253) | | | 3UTR(+1291+1307) | |
| 1726 | OPA1 H31 | ATTGATGTAAAACAATA | 1744 | OPA1 H31 | TCCTCAACCGAGCATAC |
| | 3UTR(+1240+1256) | | | 3UTR(+1294+1310) | |
| 1727 | OPA1 H31 | TGCATTGATGTAAAACA | 1745 | OPA1 H31 | ATATCCTCAACCGAGCA |
| | 3UTR(+1243+1259) | | | 3UTR(+1297+1313) | |
| 1728 | OPA1 H31 | GCATGCATTGATGTAAA | 1746 | OPA1 H31 | TTCATATCCTCAACCGA |
| | 3UTR(+1246+1262) | | | 3UTR(+1300+1316) | |
| 1729 | OPA1 H31 | GAAGCATGCATTGATGT | 1747 | OPA1 H31 | TTTTTCATATCCTCAAC |
| | 3UTR(+1249+1265) | | | 3UTR(+1303+1319) | |
| 1730 | OPA1 H31 | AACGAAGCATGCATTGA | 1748 | OPA1 H31 | TATTTTTTCATATCCTC |
| | 3UTR(+1252+1268) | | | 3UTR(+1306+1322) | |
| 1731 | OPA1 H31 | CACAACGAAGCATGCAT | 1749 | OPA1 H31 | AAGTATTTTTTCATATC |
| | 3UTR(+1255+1271) | | | 3UTR(+1309+1325) | |
| 1732 | OPA1 H31 | GATCACAACGAAGCATG | 1750 | OPA1 H31 | CGGAAGTATTTTTTCAT |
| | 3UTR(+1258+1274) | | | 3UTR(+1312+1328) | |
| 1733 | OPA1 H31 | AGGGATCACAACGAAGC | 1751 | OPA1 H31 | TTTCGGAAGTATTTTTT |
| | 3UTR(+1261+1277) | | | 3UTR(+1315+1331) | |
| 1734 | OPA1 H31 | TTGAGGGATCACAACGA | 1752 | OPA1 H31 | TGGTTTCGGAAGTATTT |
| | 3UTR(+1264+1280) | | | 3UTR(+1318+1334) | |
| 1735 | OPA1 H31 | ATCTTGAGGGATCACAA | 1753 | OPA1 H31 | TCCTGGTTTCGGAAGTA |
| | 3UTR(+1267+1283) | | | 3UTR(+1321+1337) | |
| 1736 | OPA1 H31 | TACATCTTGAGGGATCA | 1754 | OPA1 H31 | AATTCCTGGTTTCGGAA |
| | 3UTR(+1270+1286) | | | 3UTR(+1324+1340) | |
| 1737 | OPA1 H31 | TGTTACATCTTGAGGGA | 1755 | OPA1 H31 | TTGAATTCCTGGTTTCG |
| | 3UTR(+1273+1289) | | | 3UTR(+1327+1343) | |
| 1738 | OPA1 H31 | AAGTGTTACATCTTGAG | 1756 | OPA1 H31 | ACATTGAATTCCTGGTT |
| | 3UTR(+1276+1292) | | | 3UTR(+1330+1346) | |
| 1757 | OPA1 H31 | CATACATTGAATTCCTG | 1775 | OPA1 H31 | ATCTGTGCTGCTTAAGG |
| | 3UTR(+1333+1349) | | | 3UTR(+1387+1403) | |
| 1758 | OPA1 H31 | AAACATACATTGAATTC | 1776 | OPA1 H31 | CGCATCTGTGCTGCTTA |
| | 3UTR(+1336+1352) | | | 3UTR(+1390+1406) | |
| 1759 | OPA1 H31 | AACAAACATACATTGAA | 1777 | OPA1 H31 | CAGCGCATCTGTGCTGC |
| | 3UTR(+1339+1355) | | | 3UTR(+1393+1409) | |
| 1760 | OPA1 H31 | TAAAACAAACATACATT | 1778 | OPA1 H31 | TACCAGCGCATCTGTGC |
| | 3UTR(+1342+1358) | | | 3UTR(+1396+1412) | |
| 1761 | OPA1 H31 | GTATAAAACAAACATAC | 1779 | OPA1 H31 | ATCTACCAGCGCATCTG |
| | 3UTR(+1345+1361) | | | 3UTR(+1399+1415) | |
| 1762 | OPA1 H31 | ACAGTATAAAACAAACA | 1780 | OPA1 H31 | TGCATCTACCAGCGCAT |
| | 3UTR(+1348+1364) | | | 3UTR(+1402+1418) | |
| 1763 | OPA1 H31 | CAAACAGTATAAAACAA | 1781 | OPA1 H31 | CTATGCATCTACCAGCG |
| | 3UTR(+1351+1367) | | | 3UTR(+1405+1421) | |
| 1764 | OPA1 H31 | TATCAAACAGTATAAAA | 1782 | OPA1 H31 | TGACTATGCATCTACCA |
| | 3UTR(+1354+1370) | | | 3UTR(+1408+1424) | |
| 1765 | OPA1 H31 | TCTTATCAAACAGTATA | 1783 | OPA1 H31 | TCCTGACTATGCATCTA |
| | 3UTR(+1357+1373) | | | 3UTR(+1411+1427) | |
| 1766 | OPA1 H31 | TTTTCTTATCAAACAGT | 1784 | OPA1 H31 | AGTTCCTGACTATGCAT |
| | 3UTR(+1360+1376) | | | 3UTR(+1414+1430) | |
| 1767 | OPA1 H31 | TACTTTTCTTATCAAAC | 1785 | OPA1 H31 | AAAAGTTCCTGACTATG |
| | 3UTR(+1363+1379) | | | 3UTR(+1417+1433) | |
| 1768 | OPA1 H31 | ACCTACTTTTCTTATCA | 1786 | OPA1 H31 | AAAAAAAGTTCCTGACT |
| | 3UTR(+1366+1382) | | | 3UTR(+1420+1436) | |
| 1769 | OPA1 H31 | TGGACCTACTTTTCTTA | 1787 | OPA1 H31 | AATAAAAAAAGTTCCTG |
| | 3UTR(+1369+1385) | | | 3UTR(+1423+1439) | |
| 1770 | OPA1 H31 | GGCTGGACCTACTTTTC | 1788 | OPA1 H31 | AGAAATAAAAAAAGTTC |
| | 3UTR(+1372+1388) | | | 3UTR(+1426+1442) | |
| 1771 | OPA1 H31 | TAAGGCTGGACCTACTT | 1789 | OPA1 H31 | AAAAGAAATAAAAAAAG |
| | 3UTR(+1375+1391) | | | 3UTR(+1429+1445) | |
| 1772 | OPA1 H31 | GCTTAAGGCTGGACCTA | 1790 | OPA1 H31 | CCTAAAAGAAATAAAAA |
| | 3UTR(+1378+1394) | | | 3UTR(+1432+1448) | |
| 1773 | OPA1 H31 | GCTGCTTAAGGCTGGAC | 1791 | OPA1 H31 | AGACCTAAAAGAAATAA |
| | 3UTR(+1381+1397) | | | 3UTR(+1435+1451) | |
| 1774 | OPA1 H31 | TGTGCTGCTTAAGGCTG | 1792 | OPA1 H31 | CCTAGACCTAAAAGAAA |
| | 3UTR(+1384+1400) | | | 3UTR(+1438+1454) | |
| 1793 | OPA1 H31 | GTCCCTAGACCTAAAAG | 1811 | OPA1 H31 | TCCTAATCTGTGTATAG |
| | 3UTR(+1441+1457) | | | 3UTR(+1495+1511) | |
| 1794 | OPA1 H31 | CCTGTCCCTAGACCTAA | 1812 | OPA1 H31 | ATCTCCTAATCTGTGTA |
| | 3UTR(+1444+1460) | | | 3UTR(+1498+1514) | |
| 1795 | OPA1 H31 | ACTCCTGTCCCTAGACC | 1813 | OPA1 H31 | GTCATCTCCTAATCTGT |
| | 3UTR(+1447+1463) | | | 3UTR(+1501+1517) | |
| 1796 | OPA1 H31 | TTCACTCCTGTCCCTAG | 1814 | OPA1 H31 | AAGGTCATCTCCTAATC |
| | 3UTR(+1450+1466) | | | 3UTR(+1504+1520) | |
| 1797 | OPA1 H31 | CTATTCACTCCTGTCCC | 1815 | OPA1 H31 | AGTAAGGTCATCTCCTA |
| | 3UTR(+1453+1469) | | | 3UTR(+1507+1523) | |
| 1798 | OPA1 H31 | TTTCTATTCACTCCTGT | 1816 | OPA1 H31 | CCCAGTAAGGTCATCTC |
| | 3UTR(+1456+1472) | | | 3UTR(+1510+1526) | |
| 1799 | OPA1 H31 | CCCTTTCTATTCACTCC | 1817 | OPA1 H31 | GTACCCAGTAAGGTCAT |
| | 3UTR(+1459+1475) | | | 3UTR(+1513+1529) | |
| 1800 | OPA1 H31 | CCTCCCTTTCTATTCAC | 1818 | OPA1 H31 | GGTGTACCCAGTAAGGT |
| | 3UTR(+1462+1478) | | | 3UTR(+1516+1532) | |
| 1801 | OPA1 H31 | TCTCCTCCCTTTCTATT | 1819 | OPA1 H31 | AGGGGTGTACCCAGTAA |
| | 3UTR(+1465+1481) | | | 3UTR(+1519+1535) | |
| 1802 | OPA1 H31 | AGCTCTCCTCCCTTTCT | 1820 | OPA1 H31 | TAGAGGGGTGTACCCAG |
| | 3UTR(+1468+1484) | | | 3UTR(+1522+1538) | |
| 1803 | OPA1 H31 | TAGAGCTCTCCTCCCTT | 1821 | OPA1 H31 | GGTTAGAGGGGTGTACC |
| | 3UTR(+1471+1487) | | | 3UTR(+1525+1541) | |
| 1804 | OPA1 H31 | TAATAGAGCTCTCCTCC | 1822 | OPA1 H31 | ACTGGTTAGAGGGGTGT |
| | 3UTR(+1474+1490) | | | 3UTR(+1528+1544) | |
| 1805 | OPA1 H31 | ACATAATAGAGCTCTCC | 1823 | OPA1 H31 | AGCACTGGTTAGAGGGG |
| | 3UTR(+1477+1493) | | | 3UTR(+1531+1547) | |
| 1806 | OPA1 H31 | AGAACATAATAGAGCTC | 1824 | OPA1 H31 | GTAAGCACTGGTTAGAG |
| | 3UTR(+1480+1496) | | | 3UTR(+1534+1550) | |
| 1807 | OPA1 H31 | TATAGAACATAATAGAG | 1825 | OPA1 H31 | CCTGTAAGCACTGGTTA |
| | 3UTR(+1483+1499) | | | 3UTR(+1537+1553) | |
| 1808 | OPA1 H31 | GTGTATAGAACATAATA | 1826 | OPA1 H31 | TAACCTGTAAGCACTGG |
| | 3UTR(+1486+1502) | | | 3UTR(+1540+1556) | |
| 1809 | OPA1 H31 | TCTGTGTATAGAACATA | 1827 | OPA1 H31 | CATTAACCTGTAAGCAC |
| | 3UTR(+1489+1505) | | | 3UTR(+1543+1559) | |
| 1810 | OPA1 H31 | TAATCTGTGTATAGAAC | 1828 | OPA1 H31 | ATGCATTAACCTGTAAG |
| | 3UTR(+1492+1508) | | | 3UTR(+1546+1562) | |
| 1829 | OPA1 H31 | AACATGCATTAACCTGT | 1847 | OPA1 H31 | GAAATAGATGTGTAGTT |
| | 3UTR(+1549+1565) | | | 3UTR(+1603+1619) | |
| 1830 | OPA1 H31 | ATTAACATGCATTAACC | 1848 | OPA1 H31 | TTAGAAATAGATGTGTA |
| | 3UTR(+1552+1568) | | | 3UTR(+1606+1622) | |
| 1831 | OPA1 H31 | TTCATTAACATGCATTA | 1849 | OPA1 H31 | TCTTTAGAAATAGATGT |
| | 3UTR(+1555+1571) | | | 3UTR(+1609+1625) | |
| 1832 | OPA1 H31 | ATATTCATTAACATGCA | 1850 | OPA1 H31 | TATTCTTTAGAAATAGA |
| | 3UTR(+1558+1574) | | | 3UTR(+1612+1628) | |
| 1833 | OPA1 H31 | AAAATATTCATTAACAT | 1851 | OPA1 H31 | TTTTATTCTTTAGAAAT |
| | 3UTR(+1561+1577) | | | 3UTR(+1615+1631) | |
| 1834 | OPA1 H31 | GCAAAAATATTCATTAA | 1852 | OPA1 H31 | CTGTTTTATTCTTTAGA |
| | 3UTR(+1564+1580) | | | 3UTR(+1618+1634) | |
| 1835 | OPA1 H31 | ACTGCAAAAATATTCAT | 1853 | OPA1 H31 | GTCCTGTTTTATTCTTT |
| | 3UTR(+1567+1583) | | | 3UTR(+1621+1637) | |
| 1836 | OPA1 H31 | ACAACTGCAAAAATATT | 1854 | OPA1 H31 | ATGGTCCTGTTTTATTC |
| | 3UTR(+1570+1586) | | | 3UTR(+1624+1640) | |
| 1837 | OPA1 H31 | TTTACAACTGCAAAAAT | 1855 | OPA1 H31 | AATATGGTCCTGTTTTA |
| | 3UTR(+1573+1589) | | | 3UTR(+1627+1643) | |
| 1838 | OPA1 H31 | TGCTTTACAACTGCAAA | 1856 | OPA1 H31 | ATAAATATGGTCCTGTT |
| | 3UTR(+1576+1592) | | | 3UTR(+1630+1646) | |
| 1839 | OPA1 H31 | TTATGCTTTACAACTGC | 1857 | OPA1 H31 | TAAATAAATATGGTCCT |
| | 3UTR(+1579+1595) | | | 3UTR(+1633+1649) | |
| 1840 | OPA1 H31 | TTGTTATGCTTTACAAC | 1858 | OPA1 H31 | AAGTAAATAAATATGGT |
| | 3UTR(+1582+1598) | | | 3UTR(+1636+1652) | |
| 1841 | OPA1 H31 | TAATTGTTATGCTTTAC | 1859 | OPA1 H31 | CAGAAGTAAATAAATAT |
| | 3UTR(+1585+1601) | | | 3UTR(+1639+1655) | |
| 1842 | OPA1 H31 | TTGTAATTGTTATGCTT | 1860 | OPA1 H31 | TGACAGAAGTAAATAAA |
| | 3UTR(+1588+1604) | | | 3UTR(+1642+1658) | |
| 1843 | OPA1 H31 | TAGTTGTAATTGTTATG | 1861 | OPA1 H31 | AGTTGACAGAAGTAAAT |
| | 3UTR(+1591+1607) | | | 3UTR(+1645+1661) | |
| 1844 | OPA1 H31 | GTGTAGTTGTAATTGTT | 1862 | OPA1 H31 | TATAGTTGACAGAAGTA |
| | 3UTR(+1594+1610) | | | 3UTR(+1648+1664) | |
| 1845 | OPA1 H31 | GATGTGTAGTTGTAATT | 1863 | OPA1 H31 | TTCTATAGTTGACAGAA |
| | 3UTR(+1597+1613) | | | 3UTR(+1651+1667) | |
| 1846 | OPA1 H31 | ATAGATGTGTAGTTGTA | 1864 | OPA1 H31 | TCTTTCTATAGTTGACA |
| | 3UTR(+1600+1616) | | | 3UTR(+1654+1670) | |
| 1865 | OPA1 H31 | CTTTCTTTCTATAGTTG | 1883 | OPA1 H31 | TGACTAATATTAGCCTT |
| | 3UTR(+1657+1673) | | | 3UTR(+1711+1727) | |
| 1866 | OPA1 H31 | GGTCTTTCTTTCTATAG | 1884 | OPA1 H31 | TAGTGACTAATATTAGC |
| | 3UTR(+1660+1676) | | | 3UTR(+1714+1730) | |
| 1867 | OPA1 H31 | GAAGGTCTTTCTTTCTA | 1885 | OPA1 H31 | CAGTAGTGACTAATATT |
| | 3UTR(+1663+1679) | | | 3UTR(+1717+1733) | |
| 1868 | OPA1 H31 | GCTGAAGGTCTTTCTTT | 1886 | OPA1 H31 | TAACAGTAGTGACTAAT |
| | 3UTR(+1666+1682) | | | 3UTR(+1720+1736) | |
| 1869 | OPA1 H31 | ACAGCTGAAGGTCTTTC | 1887 | OPA1 H31 | TGATAACAGTAGTGACT |
| | 3UTR(+1669+1685) | | | 3UTR(+1723+1739) | |
| 1870 | OPA1 H31 | AATACAGCTGAAGGTCT | 1888 | OPA1 H31 | ATGTGATAACAGTAGTG |
| | 3UTR(+1672+1688) | | | 3UTR(+1726+1742) | |
| 1871 | OPA1 H31 | GGAAATACAGCTGAAGG | 1889 | OPA1 H31 | GGGATGTGATAACAGTA |
| | 3UTR(+1675+1691) | | | 3UTR(+1729+1745) | |
| 1872 | OPA1 H31 | TGTGGAAATACAGCTGA | 1890 | OPA1 H31 | AAAGGGATGTGATAACA |
| | 3UTR(+1678+1694) | | | 3UTR(+1732+1748) | |
| 1873 | OPA1 H31 | ATCTGTGGAAATACAGC | 1891 | OPA1 H31 | TACAAAGGGATGTGATA |
| | 3UTR(+1681+1697) | | | 3UTR(+1735+1751) | |
| 1874 | OPA1 H31 | GAAATCTGTGGAAATAC | 1892 | OPA1 H31 | TTATACAAAGGGATGTG |
| | 3UTR(+1684+1700) | | | 3UTR(+1738+1754) | |
| 1875 | OPA1 H31 | GGAGAAATCTGTGGAAA | 1893 | OPA1 H31 | AACTTATACAAAGGGAT |
| | 3UTR(+1687+1703) | | | 3UTR(+1741+1757) | |
| 1876 | OPA1 H31 | TTGGGAGAAATCTGTGG | 1894 | OPA1 H31 | TAAAACTTATACAAAGG |
| | 3UTR(+1690+1706) | | | 3UTR(+1744+1760) | |
| 1877 | OPA1 H31 | TCCTTGGGAGAAATCTG | 1895 | OPA1 H31 | TTTTAAAACTTATACAA |
| | 3UTR(+1693+1709) | | | 3UTR(+1747+1763) | |
| 1878 | OPA1 H31 | TTTTCCTTGGGAGAAAT | 1896 | OPA1 H31 | TCTTTTTAAAACTTATA |
| | 3UTR(+1696+1712) | | | 3UTR(+1750+1766) | |
| 1879 | OPA1 H31 | GCCTTTTCCTTGGGAGA | 1897 | OPA1 H31 | ATCTCTTTTTAAAACTT |
| | 3UTR(+1699+1715) | | | 3UTR(+1753+1769) | |
| 1880 | OPA1 H31 | TTAGCCTTTTCCTTGGG | 1898 | OPA1 H31 | TCCATCTCTTTTTAAAA |
| | 3UTR(+1702+1718) | | | 3UTR(+1756+1772) | |
| 1881 | OPA1 H31 | ATATTAGCCTTTTCCTT | 1899 | OPA1 H31 | CCCTCCATCTCTTTTTA |
| | 3UTR(+1705+1721) | | | 3UTR(+1759+1775) | |
| 1882 | OPA1 H31 | CTAATATTAGCCTTTTC | 1900 | OPA1 H31 | TCTCCCTCCATCTCTTT |
| | 3UTR(+1708+1724) | | | 3UTR(+1762+1778) | |
| 1901 | OPA1 H31 | AGATCTCCCTCCATCTC | 1919 | OPA1 H31 | AATTGTTATCATCTATT |
| | 3UTR(+1765+1781) | | | 3UTR(+1819+1835) | |
| 1902 | OPA1 H31 | TGAAGATCTCCCTCCAT | 1920 | OPA1 H31 | ATTAATTGTTATCATCT |
| | 3UTR(+1768+1784) | | | 3UTR(+1822+1838) | |
| 1903 | OPA1 H31 | AAATGAAGATCTCCCTC | 1921 | OPA1 H31 | AATATTAATTGTTATCA |
| | 3UTR(+1771+1787) | | | 3UTR(+1825+1841) | |
| 1904 | OPA1 H31 | AAGAAATGAAGATCTCC | 1922 | OPA1 H31 | AGTAATATTAATTGTTA |
| | 3UTR(+1774+1790) | | | 3UTR(+1828+1844) | |
| 1905 | OPA1 H31 | TCAAAGAAATGAAGATC | 1923 | OPA1 H31 | TTTAGTAATATTAATTG |
| | 3UTR(+1777+1793) | | | 3UTR(+1831+1847) | |
| 1906 | OPA1 H31 | TCCTCAAAGAAATGAAG | 1924 | OPA1 H31 | ACTTTTAGTAATATTAA |
| | 3UTR(+1780+1796) | | | 3UTR(+1834+1850) | |
| 1907 | OPA1 H31 | ATCTCCTCAAAGAAATG | 1925 | OPA1 H31 | GGGACTTTTAGTAATAT |
| | 3UTR(+1783+1799) | | | 3UTR(+1837+1853) | |
| 1908 | OPA1 H31 | CTGATCTCCTCAAAGAA | 1926 | OPA1 H31 | TGTGGGACTTTTAGTAA |
| | 3UTR(+1786+1802) | | | 3UTR(+1840+1856) | |
| 1909 | OPA1 H31 | ATACTGATCTCCTCAAA | 1927 | OPA1 H31 | TCATGTGGGACTTTTAG |
| | 3UTR(+1789+1805) | | | 3UTR(+1843+1859) | |
| 1910 | OPA1 H31 | ACAATACTGATCTCCTC | 1928 | OPA1 H31 | CTCTCATGTGGGACTTT |
| | 3UTR(+1792+1808) | | | 3UTR(+1846+1862) | |
| 1911 | OPA1 H31 | GTTACAATACTGATCTC | 1929 | OPA1 H31 | GGACTCTCATGTGGGAC |
| | 3UTR(+1795+1811) | | | 3UTR(+1849+1865) | |
| 1912 | OPA1 H31 | TACGTTACAATACTGAT | 1930 | OPA1 H31 | TCAGGACTCTCATGTGG |
| | 3UTR(+1798+1814) | | | 3UTR(+1852+1868) | |
| 1913 | OPA1 H31 | ACATACGTTACAATACT | 1931 | OPA1 H31 | GCGTCAGGACTCTCATG |
| | 3UTR(+1801+1817) | | | 3UTR(+1855+1871) | |
| 1914 | OPA1 H31 | TTCACATACGTTACAAT | 1932 | OPA1 H31 | AGGGCGTCAGGACTCTC |
| | 3UTR(+1804+1820) | | | 3UTR(+1858+1874) | |
| 1915 | OPA1 H31 | CTATTCACATACGTTAC | 1933 | OPA1 H31 | GAGAGGGCGTCAGGACT |
| | 3UTR(+1807+1823) | | | 3UTR(+1861+1877) | |
| 1916 | OPA1 H31 | CATCTATTCACATACGT | 1934 | OPA1 H31 | ATGGAGAGGGCGTCAGG |
| | 3UTR(+1810+1826) | | | 3UTR(+1864+1880) | |
| 1917 | OPA1 H31 | TATCATCTATTCACATA | 1935 | OPA1 H31 | GGCATGGAGAGGGCGTC |
| | 3UTR(+1813+1829) | | | 3UTR(+1867+1883) | |
| 1918 | OPA1 H31 | TGTTATCATCTATTCAC | 1936 | OPA1 H31 | TGGGGCATGGAGAGGGC |
| | 3UTR(+1816+1832) | | | 3UTR(+1870+1886) | |
| 1937 | OPA1 H31 | CTGTGGGGCATGGAGAG | 1955 | OPA1 H31 | AGGATGAGATCAGCTAA |
| | 3UTR(+1873+1889) | | | 3UTR(+1927+1943) | |
| 1938 | OPA1 H31 | TTACTGTGGGGCATGGA | 1956 | OPA1 H31 | CTTAGGATGAGATCAGC |
| | 3UTR(+1876+1892) | | | 3UTR(+1930+1946) | |
| 1939 | OPA1 H31 | ACATTACTGTGGGGCAT | 1957 | OPA1 H31 | ATGCTTAGGATGAGATC |
| | 3UTR(+1879+1895) | | | 3UTR(+1933+1949) | |
| 1940 | OPA1 H31 | GCCACATTACTGTGGGG | 1958 | OPA1 H31 | AGCATGCTTAGGATGAG |
| | 3UTR(+1882+1898) | | | 3UTR(+1936+1952) | |
| 1941 | OPA1 H31 | GAAGCCACATTACTGTG | 1959 | OPA1 H31 | TAAAGCATGCTTAGGAT |
| | 3UTR(+1885+1901) | | | 3UTR(+1939+1955) | |
| 1942 | OPA1 H31 | AAAGAAGCCACATTACT | 1960 | OPA1 H31 | AAATAAAGCATGCTTAG |
| | 3UTR(+1888+1904) | | | 3UTR(+1942+1958) | |
| 1943 | OPA1 H31 | ATGAAAGAAGCCACATT | 1961 | OPA1 H31 | GAAAAATAAAGCATGCT |
| | 3UTR(+1891+1907) | | | 3UTR(+1945+1961) | |
| 1944 | OPA1 H31 | CCCATGAAAGAAGCCAC | 1962 | OPA1 H31 | AAGGAAAAATAAAGCAT |
| | 3UTR(+1894+1910) | | | 3UTR(+1948+1964) | |
| 1945 | OPA1 H31 | AAACCCATGAAAGAAGC | 1963 | OPA1 H31 | TTCAAGGAAAAATAAAG |
| | 3UTR(+1897+1913) | | | 3UTR(+1951+1967) | |
| 1946 | OPA1 H31 | AAAAAACCCATGAAAGA | 1964 | OPA1 H31 | GCTTTCAAGGAAAAATA |
| | 3UTR(+1900+1916) | | | 3UTR(+1954+1970) | |
| 1947 | OPA1 H31 | AAAAAAAAACCCATGAA | 1965 | OPA1 H31 | CTAGCTTTCAAGGAAAA |
| | 3UTR(+1903+1919) | | | 3UTR(+1957+1973) | |
| 1948 | OPA1 H31 | AAGAAAAAAAAACCCAT | 1966 | OPA1 H31 | TACCTAGCTTTCAAGGA |
| | 3UTR(+1906+1922) | | | 3UTR(+1960+1976) | |
| 1949 | OPA1 H31 | AAGAAGAAAAAAAAACC | 1967 | OPA1 H31 | AAATACCTAGCTTTCAA |
| | 3UTR(+1909+1925) | | | 3UTR(+1963+1979) | |
| 1950 | OPA1 H31 | AAAAAGAAGAAAAAAAA | 1968 | OPA1 H31 | GATAAATACCTAGCTTT |
| | 3UTR(+1912+1928) | | | 3UTR(+1966+1982) | |
| 1951 | OPA1 H31 | GCTAAAAAGAAGAAAAA | 1969 | OPA1 H31 | GTTGATAAATACCTAGC |
| | 3UTR(+1915+1931) | | | 3UTR(+1969+1985) | |
| 1952 | OPA1 H31 | TCAGCTAAAAAGAAGAA | 1970 | OPA1 H31 | GCAGTTGATAAATACCT |
| | 3UTR(+1918+1934) | | | 3UTR(+1972+1988) | |
| 1953 | OPA1 H31 | AGATCAGCTAAAAAGAA | 1971 | OPA1 H31 | TCTGCAGTTGATAAATA |
| | 3UTR(+1921+1937) | | | 3UTR(+1975+1991) | |
| 1954 | OPA1 H31 | ATGAGATCAGCTAAAAA | 1972 | OPA1 H31 | ACATCTGCAGTTGATAA |
| | 3UTR(+1924+1940) | | | 3UTR(+1978+1994) | |
| 1973 | OPA1 H31 | ATAACATCTGCAGTTGA | 1991 | OPA1 H31 | CTACAGACACAAGACAC |
| | 3UTR(+1981+1997) | | | 3UTR(+2035+2051) | |
| 1974 | OPA1 H31 | TCAATAACATCTGCAGT | 1992 | OPA1 H31 | GAACTACAGACACAAGA |
| | 3UTR(+1984+2000) | | | 3UTR(+2038+2054) | |
| 1975 | OPA1 H31 | CTTTCAATAACATCTGC | 1993 | OPA1 H31 | TTTGAACTACAGACACA |
| | 3UTR(+1987+2003) | | | 3UTR(+2041+2057) | |
| 1976 | OPA1 H31 | TTTCTTTCAATAACATC | 1994 | OPA1 H31 | ACTTTTGAACTACAGAC |
| | 3UTR(+1990+2006) | | | 3UTR(+2044+2060) | |
| 1977 | OPA1 H31 | TATTTTCTTTCAATAAC | 1995 | OPA1 H31 | CTGACTTTTGAACTACA |
| | 3UTR(+1993+2009) | | | 3UTR(+2047+2063) | |
| 1978 | OPA1 H31 | TTTTATTTTCTTTCAAT | 1996 | OPA1 H31 | TTTCTGACTTTTGAACT |
| | 3UTR(+1996+2012) | | | 3UTR(+2050+2066) | |
| 1979 | OPA1 H31 | GAATTTTATTTTCTTTC | 1997 | OPA1 H31 | TCATTTCTGACTTTTGA |
| | 3UTR(+1999+2015) | | | 3UTR(+2053+2069) | |
| 1980 | OPA1 H31 | ACTGAATTTTATTTTCT | 1998 | OPA1 H31 | GAATCATTTCTGACTTT |
| | 3UTR(+2002+2018) | | | 3UTR(+2056+2072) | |
| 1981 | OPA1 H31 | GAGACTGAATTTTATTT | 1999 | OPA1 H31 | TTAGAATCATTTCTGAC |
| | 3UTR(+2005+2021) | | | 3UTR(+2059+2075) | |
| 1982 | OPA1 H31 | CTTGAGACTGAATTTTA | 2000 | OPA1 H31 | AAATTAGAATCATTTCT |
| | 3UTR(+2008+2024) | | | 3UTR(+2062+2078) | |
| 1983 | OPA1 H31 | ACTCTTGAGACTGAATT | 2001 | OPA1 H31 | TTTAAATTAGAATCATT |
| | 3UTR(+2011+2027) | | | 3UTR(+2065+2081) | |
| 1984 | OPA1 H31 | TTTACTCTTGAGACTGA | 2002 | OPA1 H31 | TTGTTTAAATTAGAATC |
| | 3UTR(+2014+2030) | | | 3UTR(+2068+2084) | |
| 1985 | OPA1 H31 | GGGTTTACTCTTGAGAC | 2003 | OPA1 H31 | TTTTTGTTTAAATTAGA |
| | 3UTR(+2017+2033) | | | 3UTR(+2071+2087) | |
| 1986 | OPA1 H31 | ACAGGGTTTACTCTTGA | 2004 | OPA1 H31 | ATCTTTTTGTTTAAATT |
| | 3UTR(+2020+2036) | | | 3UTR(+2074+2090) | |
| 1987 | OPA1 H31 | GACACAGGGTTTACTCT | 2005 | OPA1 H31 | AGTATCTTTTTGTTTAA |
| | 3UTR(+2023+2039) | | | 3UTR(+2077+2093) | |
| 1988 | OPA1 H31 | CAAGACACAGGGTTTAC | 2006 | OPA1 H31 | TTTAGTATCTTTTTGTT |
| | 3UTR(+2026+2042) | | | 3UTR(+2080+2096) | |
| 1989 | OPA1 H31 | ACACAAGACACAGGGTT | 2007 | OPA1 H31 | ATATTTAGTATCTTTTT |
| | 3UTR(+2029+2045) | | | 3UTR(+2083+2099) | |
| 1990 | OPA1 H31 | CAGACACAAGACACAGG | 2008 | OPA1 H31 | TGTATATTTAGTATCTT |
| | 3UTR(+2032+2048) | | | 3UTR(+2086+2102) | |
| 2009 | OPA1 H31 | TTCTGTATATTTAGTAT | 2027 | OPA1 H31 | CTTTGCAAATTCTGACA |
| | 3UTR(+2089+2105) | | | 3UTR(+2143+2159) | |
| 2010 | OPA1 H31 | AACTTCTGTATATTTAG | 2028 | OPA1 H31 | ACTCTTTGCAAATTCTG |
| | 3UTR(+2092+2108) | | | 3UTR(+2146+2162) | |
| 2011 | OPA1 H31 | TTTAACTTCTGTATATT | 2029 | OPA1 H31 | TCCACTCTTTGCAAATT |
| | 3UTR(+2095+2111) | | | 3UTR(+2149+2165) | |
| 2012 | OPA1 H31 | GAATTTAACTTCTGTAT | 2030 | OPA1 H31 | CACTCCACTCTTTGCAA |
| | 3UTR(+2098+2114) | | | 3UTR(+2152+2168) | |
| 2013 | OPA1 H31 | TTCGAATTTAACTTCTG | 2031 | OPA1 H31 | GTCCACTCCACTCTTTG |
| | 3UTR(+2101+2117) | | | 3UTR(+2155+2171) | |
| 2014 | OPA1 H31 | TAGTTCGAATTTAACTT | 2032 | OPA1 H31 | TTTGTCCACTCCACTCT |
| | 3UTR(+2104+2120) | | | 3UTR(+2158+2174) | |
| 2015 | OPA1 H31 | GGCTAGTTCGAATTTAA | 2033 | OPA1 H31 | AGCTTTGTCCACTCCAC |
| | 3UTR(+2107+2123) | | | 3UTR(+2161+2177) | |
| 2016 | OPA1 H31 | TGTGGCTAGTTCGAATT | 2034 | OPA1 H31 | CAGAGCTTTGTCCACTC |
| | 3UTR(+2110+2126) | | | 3UTR(+2164+2180) | |
| 2017 | OPA1 H31 | TTCTGTGGCTAGTTCGA | 2035 | OPA1 H31 | ATACAGAGCTTTGTCCA |
| | 3UTR(+2113+2129) | | | 3UTR(+2167+2183) | |
| 2018 | OPA1 H31 | TGATTCTGTGGCTAGTT | 2036 | OPA1 H31 | TCCATACAGAGCTTTGT |
| | 3UTR(+2116+2132) | | | 3UTR(+2170+2186) | |
| 2019 | OPA1 H31 | AAATGATTCTGTGGCTA | 2037 | OPA1 H31 | TCTTCCATACAGAGCTT |
| | 3UTR(+2119+2135) | | | 3UTR(+2173+2189) | |
| 2020 | OPA1 H31 | AACAAATGATTCTGTGG | 2038 | OPA1 H31 | CAGTCTTCCATACAGAG |
| | 3UTR(+2122+2138) | | | 3UTR(+2176+2192) | |
| 2021 | OPA1 H31 | AAAAACAAATGATTCTG | 2039 | OPA1 H31 | GTTCAGTCTTCCATACA |
| | 3UTR(+2125+2141) | | | 3UTR(+2179+2195) | |
| 2022 | OPA1 H31 | CATAAAAACAAATGATT | 2040 | OPA1 H31 | GTTGTTCAGTCTTCCAT |
| | 3UTR(+2128+2144) | | | 3UTR(+2182+2198) | |
| 2023 | OPA1 H31 | TGACATAAAAACAAATG | 2041 | OPA1 H31 | ACAGTTGTTCAGTCTTC |
| | 3UTR(+2131+2147) | | | 3UTR(+2185+2201) | |
| 2024 | OPA1 H31 | TTCTGACATAAAAACAA | 2042 | OPA1 H31 | TTTACAGTTGTTCAGTC |
| | 3UTR(+2134+2150) | | | 3UTR(+2188+2204) | |
| 2025 | OPA1 H31 | AAATTCTGACATAAAAA | 2043 | OPA1 H31 | CTATTTACAGTTGTTCA |
| | 3UTR(+2137+2153) | | | 3UTR(+2191+2207) | |
| 2026 | OPA1 H31 | TGCAAATTCTGACATAA | 2044 | OPA1 H31 | CATCTATTTACAGTTGT |
| | 3UTR(+2140+2156) | | | 3UTR(+2194+2210) | |
| 2045 | OPA1 H31 | TATCATCTATTTACAGT | 2063 | OPA1 H31 | CTGCCTAGGTACACTGA |
| | 3UTR(+2197+2213) | | | 3UTR(+2251+2267) | |
| 2046 | OPA1 H31 | GGATATCATCTATTTAC | 2064 | OPA1 H31 | GCACTGCCTAGGTACAC |
| | 3UTR(+2200+2216) | | | 3UTR(+2254+2270) | |
| 2047 | OPA1 H31 | TTTGGATATCATCTATT | 2065 | OPA1 H31 | TGTGCACTGCCTAGGTA |
| | 3UTR(+2203+2219) | | | 3UTR(+2257+2273) | |
| 2048 | OPA1 H31 | AAGTTTGGATATCATCT | 2066 | OPA1 H31 | TGCTGTGCACTGCCTAG |
| | 3UTR(+2206+2222) | | | 3UTR(+2260+2276) | |
| 2049 | OPA1 H31 | ATTAAGTTTGGATATCA | 2067 | OPA1 H31 | TCGTGCTGTGCACTGCC |
| | 3UTR(+2209+2225) | | | 3UTR(+2263+2279) | |
| 2050 | OPA1 H31 | CAAATTAAGTTTGGATA | 2068 | OPA1 H31 | ATTTCGTGCTGTGCACT |
| | 3UTR(+2212+2228) | | | 3UTR(+2266+2282) | |
| 2051 | OPA1 H31 | AGCCAAATTAAGTTTGG | 2069 | OPA1 H31 | CTTATTTCGTGCTGTGC |
| | 3UTR(+2215+2231) | | | 3UTR(+2269+2285) | |
| 2052 | OPA1 H31 | CCTAGCCAAATTAAGTT | 2070 | OPA1 H31 | CCACTTATTTCGTGCTG |
| | 3UTR(+2218+2234) | | | 3UTR(+2272+2288) | |
| 2053 | OPA1 H31 | AGTCCTAGCCAAATTAA | 2071 | OPA1 H31 | GGGCCACTTATTTCGTG |
| | 3UTR(+2221+2237) | | | 3UTR(+2275+2291) | |
| 2054 | OPA1 H31 | TGAAGTCCTAGCCAAAT | 2072 | OPA1 H31 | CAAGGGCCACTTATTTC |
| | 3UTR(+2224+2240) | | | 3UTR(+2278+2294) | |
| 2055 | OPA1 H31 | AATTGAAGTCCTAGCCA | 2073 | OPA1 H31 | CTGCAAGGGCCACTTAT |
| | 3UTR(+2227+2243) | | | 3UTR(+2281+2297) | |
| 2056 | OPA1 H31 | TAAAATTGAAGTCCTAG | 2074 | OPA1 H31 | AAGCTGCAAGGGCCACT |
| | 3UTR(+2230+2246) | | | 3UTR(+2284+2300) | |
| 2057 | OPA1 H31 | TTTTAAAATTGAAGTCC | 2075 | OPA1 H31 | GGGAAGCTGCAAGGGCC |
| | 3UTR(+2233+2249) | | | 3UTR(+2287+2303) | |
| 2058 | OPA1 H31 | GATTTTTAAAATTGAAG | 2076 | OPA1 H31 | ACGGGGAAGCTGCAAGG |
| | 3UTR(+2236+2252) | | | 3UTR(+2290+2306) | |
| 2059 | OPA1 H31 | ACTGATTTTTAAAATTG | 2077 | OPA1 H31 | TAAACGGGGAAGCTGCA |
| | 3UTR(+2239+2255) | | | 3UTR(+2293+2309) | |
| 2060 | OPA1 H31 | TACACTGATTTTTAAAA | 2078 | OPA1 H31 | GGTTAAACGGGGAAGCT |
| | 3UTR(+2242+2258) | | | 3UTR(+2296+2312) | |
| 2061 | OPA1 H31 | AGGTACACTGATTTTTA | 2079 | OPA1 H31 | GTGGGTTAAACGGGGAA |
| | 3UTR(+2245+2261) | | | 3UTR(+2299+2315) | |
| 2062 | OPA1 H31 | CCTAGGTACACTGATTT | 2080 | OPA1 H31 | ACAGTGGGTTAAACGGG |
| | 3UTR(+2248+2264) | | | 3UTR(+2302+2318) | |
| 2081 | OPA1 H31 | AGCACAGTGGGTTAAAC | 2099 | OPA1 H31 | AAGAGGGCAATATCATA |
| | 3UTR(+2305+2321) | | | 3UTR(+2359+2375) | |
| 2082 | OPA1 H31 | TATAGCACAGTGGGTTA | 2100 | OPA1 H31 | ACAAAGAGGGCAATATC |
| | 3UTR(+2308+2324) | | | 3UTR(+2362+2378) | |
| 2083 | OPA1 H31 | AACTATAGCACAGTGGG | 2101 | OPA1 H31 | AATACAAAGAGGGCAAT |
| | 3UTR(+2311+2327) | | | 3UTR(+2365+2381) | |
| 2084 | OPA1 H31 | CGCAACTATAGCACAGT | 2102 | OPA1 H31 | GGGAATACAAAGAGGGC |
| | 3UTR(+2314+2330) | | | 3UTR(+2368+2384) | |
| 2085 | OPA1 H31 | ACCCGCAACTATAGCAC | 2103 | OPA1 H31 | AATGGGAATACAAAGAG |
| | 3UTR(+2317+2333) | | | 3UTR(+2371+2387) | |
| 2086 | OPA1 H31 | TCCACCCGCAACTATAG | 2104 | OPA1 H31 | GAAAATGGGAATACAAA |
| | 3UTR(+2320+2336) | | | 3UTR(+2374+2390) | |
| 2087 | OPA1 H31 | TGTTCCACCCGCAACTA | 2105 | OPA1 H31 | GTAGAAAATGGGAATAC |
| | 3UTR(+2323+2339) | | | 3UTR(+2377+2393) | |
| 2088 | OPA1 H31 | GACTGTTCCACCCGCAA | 2106 | OPA1 H31 | ACTGTAGAAAATGGGAA |
| | 3UTR(+2326+2342) | | | 3UTR(+2380+2396) | |
| 2089 | OPA1 H31 | GTTGACTGTTCCACCCG | 2107 | OPA1 H31 | AAAACTGTAGAAAATGG |
| | 3UTR(+2329+2345) | | | 3UTR(+2383+2399) | |
| 2090 | OPA1 H31 | AAGGTTGACTGTTCCAC | 2108 | OPA1 H31 | GAAAAAACTGTAGAAAA |
| | 3UTR(+2332+2348) | | | 3UTR(+2386+2402) | |
| 2091 | OPA1 H31 | AGAAAGGTTGACTGTTC | 2109 | OPA1 H31 | GCGGAAAAAACTGTAGA |
| | 3UTR(+2335+2351) | | | 3UTR(+2389+2405) | |
| 2092 | OPA1 H31 | ACTAGAAAGGTTGACTG | 2110 | OPA1 H31 | TCTGCGGAAAAAACTGT |
| | 3UTR(+2338+2354) | | | 3UTR(+2392+2408) | |
| 2093 | OPA1 H31 | ACTACTAGAAAGGTTGA | 2111 | OPA1 H31 | AAGTCTGCGGAAAAAAC |
| | 3UTR(+2341+2357) | | | 3UTR(+2395+2411) | |
| 2094 | OPA1 H31 | TAAACTACTAGAAAGGT | 2112 | OPA1 H31 | AAGAAGTCTGCGGAAAA |
| | 3UTR(+2344+2360) | | | 3UTR(+2398+2414) | |
| 2095 | OPA1 H31 | TCATAAACTACTAGAAA | 2113 | OPA1 H31 | AGAAAGAAGTCTGCGGA |
| | 3UTR(+2347+2363) | | | 3UTR(+2401+2417) | |
| 2096 | OPA1 H31 | ATATCATAAACTACTAG | 2114 | OPA1 H31 | TGCAGAAAGAAGTCTGC |
| | 3UTR(+2350+2366) | | | 3UTR(+2404+2420) | |
| 2097 | OPA1 H31 | GCAATATCATAAACTAC | 2115 | OPA1 H31 | ATTTGCAGAAAGAAGTC |
| | 3UTR(+2353+2369) | | | 3UTR(+2407+2423) | |
| 2098 | OPA1 H31 | AGGGCAATATCATAAAC | 2116 | OPA1 H31 | ATAATTTGCAGAAAGAA |
| | 3UTR(+2356+2372) | | | 3UTR(+2410+2426) | |
| 2117 | OPA1 H31 | TGAATAATTTGCAGAAA | 2135 | OPA1 H31 | ACTCTCTGCCATGTTCC |
| | 3UTR(+2413+2429) | | | 3UTR(+2467+2483) | |
| 2118 | OPA1 H31 | GGCTGAATAATTTGCAG | 2136 | OPA1 H31 | ACCACTCTCTGCCATGT |
| | 3UTR(+2416+2432) | | | 3UTR(+2470+2486) | |
| 2119 | OPA1 H31 | GGAGGCTGAATAATTTG | 2137 | OPA1 H31 | AGCACCACTCTCTGCCA |
| | 3UTR(+2419+2435) | | | 3UTR(+2473+2489) | |
| 2120 | OPA1 H31 | TTTGGAGGCTGAATAAT | 2138 | OPA1 H31 | GGAAGCACCACTCTCTG |
| | 3UTR(+2422+2438) | | | 3UTR(+2476+2492) | |
| 2121 | OPA1 H31 | GCATTTGGAGGCTGAAT | 2139 | OPA1 H31 | CTGGGAAGCACCACTCT |
| | 3UTR(+2425+2441) | | | 3UTR(+2479+2495) | |
| 2122 | OPA1 H31 | TTTGCATTTGGAGGCTG | 2140 | OPA1 H31 | AGGCTGGGAAGCACCAC |
| | 3UTR(+2428+2444) | | | 3UTR(+2482+2498) | |
| 2123 | OPA1 H31 | TCATTTGCATTTGGAGG | 2141 | OPA1 H31 | GTGAGGCTGGGAAGCAC |
| | 3UTR(+2431+2447) | | | 3UTR(+2485+2501) | |
| 2124 | OPA1 H31 | CATTCATTTGCATTTGG | 2142 | OPA1 H31 | ATTGTGAGGCTGGGAAG |
| | 3UTR(+2434+2450) | | | 3UTR(+2488+2504) | |
| 2125 | OPA1 H31 | TATCATTCATTTGCATT | 2143 | OPA1 H31 | CACATTGTGAGGCTGGG |
| | 3UTR(+2437+2453) | | | 3UTR(+2491+2507) | |
| 2126 | OPA1 H31 | TTATATCATTCATTTGC | 2144 | OPA1 H31 | TCCCACATTGTGAGGCT |
| | 3UTR(+2440+2456) | | | 3UTR(+2494+2510) | |
| 2127 | OPA1 H31 | TTTTTATATCATTCATT | 2145 | OPA1 H31 | AATTCCCACATTGTGAG |
| | 3UTR(+2443+2459) | | | 3UTR(+2497+2513) | |
| 2128 | OPA1 H31 | TTATTTTTATATCATTC | 2146 | OPA1 H31 | TCAAATTCCCACATTGT |
| | 3UTR(+2446+2462) | | | 3UTR(+2500+2516) | |
| 2129 | OPA1 H31 | TACTTATTTTTATATCA | 2147 | OPA1 H31 | ATGTCAAATTCCCACAT |
| | 3UTR(+2449+2465) | | | 3UTR(+2503+2519) | |
| 2130 | OPA1 H31 | CCCTACTTATTTTTATA | 2148 | OPA1 H31 | CCTATGTCAAATTCCCA |
| | 3UTR(+2452+2468) | | | 3UTR(+2506+2522) | |
| 2131 | OPA1 H31 | GTTCCCTACTTATTTTT | 2149 | OPA1 H31 | CATCCTATGTCAAATTC |
| | 3UTR(+2455+2471) | | | 3UTR(+2509+2525) | |
| 2132 | OPA1 H31 | CATGTTCCCTACTTATT | 2150 | OPA1 H31 | TCTCATCCTATGTCAAA |
| | 3UTR(+2458+2474) | | | 3UTR(+2512+2528) | |
| 2133 | OPA1 H31 | TGCCATGTTCCCTACTT | 2151 | OPA1 H31 | GACTCTCATCCTATGTC |
| | 3UTR(+2461+2477) | | | 3UTR(+2515+2531) | |
| 2134 | OPA1 H31 | CTCTGCCATGTTCCCTA | 2152 | OPA1 H31 | TCTGACTCTCATCCTAT |
| | 3UTR(+2464+2480) | | | 3UTR(+2518+2534) | |
| 2153 | OPA1 H31 | TACTCTGACTCTCATCC | 2171 | OPA1 H31 | TCTAGAATAAATAAATA |
| | 3UTR(+2521+2537) | | | 3UTR(+2575+2591) | |
| 2154 | OPA1 H31 | CTATACTCTGACTCTCA | 2172 | OPA1 H31 | ACATCTAGAATAAATAA |
| | 3UTR(+2524+2540) | | | 3UTR(+2578+2594) | |
| 2155 | OPA1 H31 | AACCTATACTCTGACTC | 2173 | OPA1 H31 | CATACATCTAGAATAAA |
| | 3UTR(+2527+2543) | | | 3UTR(+2581+2597) | |
| 2156 | OPA1 H31 | TTAAACCTATACTCTGA | 2174 | OPA1 H31 | ATACATACATCTAGAAT |
| | 3UTR(+2530+2546) | | | 3UTR(+2584+2600) | |
| 2157 | OPA1 H31 | CTTTTAAACCTATACTC | 2175 | OPA1 H31 | CAGATACATACATCTAG |
| | 3UTR(+2533+2549) | | | 3UTR(+2587+2603) | |
| 2158 | OPA1 H31 | TATCTTTTAAACCTATA | 2176 | OPA1 H31 | CCTCAGATACATACATC |
| | 3UTR(+2536+2552) | | | 3UTR(+2590+2606) | |
| 2159 | OPA1 H31 | TTTTATCTTTTAAACCT | 2177 | OPA1 H31 | TTTCCTCAGATACATAC |
| | 3UTR(+2539+2555) | | | 3UTR(+2593+2609) | |
| 2160 | OPA1 H31 | AGATTTTATCTTTTAAA | 2178 | OPA1 H31 | TTCTTTCCTCAGATACA |
| | 3UTR(+2542+2558) | | | 3UTR(+2596+2612) | |
| 2161 | OPA1 H31 | TAAAGATTTTATCTTTT | 2179 | OPA1 H31 | GATTTCTTTCCTCAGAT |
| | 3UTR(+2545+2561) | | | 3UTR(+2599+2615) | |
| 2162 | OPA1 H31 | AACTAAAGATTTTATCT | 2180 | OPA1 H31 | CCAGATTTCTTTCCTCA |
| | 3UTR(+2548+2564) | | | 3UTR(+2602+2618) | |
| 2163 | OPA1 H31 | ATTAACTAAAGATTTTA | 2181 | OPA1 H31 | ATACCAGATTTCTTTCC |
| | 3UTR(+2551+2567) | | | 3UTR(+2605+2621) | |
| 2164 | OPA1 H31 | ATTATTAACTAAAGATT | 2182 | OPA1 H31 | AAAATACCAGATTTCTT |
| | 3UTR(+2554+2570) | | | 3UTR(+2608+2624) | |
| 2165 | OPA1 H31 | AAAATTATTAACTAAAG | 2183 | OPA1 H31 | GCAAAAATACCAGATTT |
| | 3UTR(+2557+2573) | | | 3UTR(+2611+2627) | |
| 2166 | OPA1 H31 | TACAAAATTATTAACTA | 2184 | OPA1 H31 | AAAGCAAAAATACCAGA |
| | 3UTR(+2560+2576) | | | 3UTR(+2614+2630) | |
| 2167 | OPA1 H31 | AAATACAAAATTATTAA | 2185 | OPA1 H31 | TGGAAAGCAAAAATACC |
| | 3UTR(+2563+2579) | | | 3UTR(+2617+2633) | |
| 2168 | OPA1 H31 | AATAAATACAAAATTAT | 2186 | OPA1 H31 | TATTGGAAAGCAAAAAT |
| | 3UTR(+2566+2582) | | | 3UTR(+2620+2636) | |
| 2169 | OPA1 H31 | ATAAATAAATACAAAAT | 2187 | OPA1 H31 | CTTTATTGGAAAGCAAA |
| | 3UTR(+2569+2585) | | | 3UTR(+2623+2639) | |
| 2170 | OPA1 H31 | AGAATAAATAAATACAA | 2188 | OPA1 H31 | CCCCTTTATTGGAAAGC |
| | 3UTR(+2572+2588) | | | 3UTR(+2626+2642) | |
| 2189 | OPA1 H31 | GATCCCCTTTATTGGAA | 2207 | OPA1 H31 | GCTAGAGCTATAACATA |
| | 3UTR(+2629+2645) | | | 3UTR(+2683+2699) | |
| 2190 | OPA1 H31 | TTTGATCCCCTTTATTG | 2208 | OPA1 H31 | ACTGCTAGAGCTATAAC |
| | 3UTR(+2632+2648) | | | 3UTR(+2686+2702) | |
| 2191 | OPA1 H31 | TACTTTGATCCCCTTTA | 2209 | OPA1 H31 | CATACTGCTAGAGCTAT |
| | 3UTR(+2635+2651) | | | 3UTR(+2689+2705) | |
| 2192 | OPA1 H31 | CATTACTTTGATCCCCT | 2210 | OPA1 H31 | TTCCATACTGCTAGAGC |
| | 3UTR(+2638+2654) | | | 3UTR(+2692+2708) | |
| 2193 | OPA1 H31 | AACCATTACTTTGATCC | 2211 | OPA1 H31 | CATTTCCATACTGCTAG |
| | 3UTR(+2641+2657) | | | 3UTR(+2695+2711) | |
| 2194 | OPA1 H31 | AAAAACCATTACTTTGA | 2212 | OPA1 H31 | GCACATTTCCATACTGC |
| | 3UTR(+2644+2660) | | | 3UTR(+2698+2714) | |
| 2195 | OPA1 H31 | GAGAAAAACCATTACTT | 2213 | OPA1 H31 | AAAGCACATTTCCATAC |
| | 3UTR(+2647+2663) | | | 3UTR(+2701+2717) | |
| 2196 | OPA1 H31 | TGAGAGAAAAACCATTA | 2214 | OPA1 H31 | TTTAAAGCACATTTCCA |
| | 3UTR(+2650+2666) | | | 3UTR(+2704+2720) | |
| 2197 | OPA1 H31 | AACTGAGAGAAAAACCA | 2215 | OPA1 H31 | TATTTTAAAGCACATTT |
| | 3UTR(+2653+2669) | | | 3UTR(+2707+2723) | |
| 2198 | OPA1 H31 | GAGAACTGAGAGAAAAA | 2216 | OPA1 H31 | GCATATTTTAAAGCACA |
| | 3UTR(+2656+2672) | | | 3UTR(+2710+2726) | |
| 2199 | OPA1 H31 | TTAGAGAACTGAGAGAA | 2217 | OPA1 H31 | TAAGCATATTTTAAAGC |
| | 3UTR(+2659+2675) | | | 3UTR(+2713+2729) | |
| 2200 | OPA1 H31 | AGCTTAGAGAACTGAGA | 2218 | OPA1 H31 | AGGTAAGCATATTTTAA |
| | 3UTR(+2662+2678) | | | 3UTR(+2716+2732) | |
| 2201 | OPA1 H31 | ACCAGCTTAGAGAACTG | 2219 | OPA1 H31 | AAAAGGTAAGCATATTT |
| | 3UTR(+2665+2681) | | | 3UTR(+2719+2735) | |
| 2202 | OPA1 H31 | TAGACCAGCTTAGAGAA | 2220 | OPA1 H31 | TTCAAAAGGTAAGCATA |
| | 3UTR(+2668+2684) | | | 3UTR(+2722+2738) | |
| 2203 | OPA1 H31 | ACATAGACCAGCTTAGA | 2221 | OPA1 H31 | TCATTCAAAAGGTAAGC |
| | 3UTR(+2671+2687) | | | 3UTR(+2725+2741) | |
| 2204 | OPA1 H31 | ATAACATAGACCAGCTT | 2222 | OPA1 H31 | TGATCATTCAAAAGGTA |
| | 3UTR(+2674+2690) | | | 3UTR(+2728+2744) | |
| 2205 | OPA1 H31 | GCTATAACATAGACCAG | 2223 | OPA1 H31 | CCATGATCATTCAAAAG |
| | 3UTR(+2677+2693) | | | 3UTR(+2731+2747) | |
| 2206 | OPA1 H31 | AGAGCTATAACATAGAC | 2224 | OPA1 H31 | TAGCCATGATCATTCAA |
| | 3UTR(+2680+2696) | | | 3UTR(+2734+2750) | |
| 2225 | OPA1 H31 | ATATAGCCATGATCATT | 2243 | OPA1 H31 | GTTCATTCACAGTGCAC |
| | 3UTR(+2737+2753) | | | 3UTR(+2791+2807) | |
| 2226 | OPA1 H31 | AACATATAGCCATGATC | 2244 | OPA1 H31 | AAAGTTCATTCACAGTG |
| | 3UTR(+2740+2756) | | | 3UTR(+2794+2810) | |
| 2227 | OPA1 H31 | AACAACATATAGCCATG | 2245 | OPA1 H31 | TACAAAGTTCATTCACA |
| | 3UTR(+2743+2759) | | | 3UTR(+2797+2813) | |
| 2228 | OPA1 H31 | CTCAACAACATATAGCC | 2246 | OPA1 H31 | TAATACAAAGTTCATTC |
| | 3UTR(+2746+2762) | | | 3UTR(+2800+2816) | |
| 2229 | OPA1 H31 | TATCTCAACAACATATA | 2247 | OPA1 H31 | AAATAATACAAAGTTCA |
| | 3UTR(+2749+2765) | | | 3UTR(+2803+2819) | |
| 2230 | OPA1 H31 | AAATATCTCAACAACAT | 2248 | OPA1 H31 | AAAAAATAATACAAAGT |
| | 3UTR(+2752+2768) | | | 3UTR(+2806+2822) | |
| 2231 | OPA1 H31 | TTCAAATATCTCAACAA | 2249 | OPA1 H31 | TTAAAAAAATAATACAA |
| | 3UTR(+2755+2771) | | | 3UTR(+2809+2825) | |
| 2232 | OPA1 H31 | AGTTTCAAATATCTCAA | 2250 | OPA1 H31 | GTTTTAAAAAAATAATA |
| | 3UTR(+2758+2774) | | | 3UTR(+2812+2828) | |
| 2233 | OPA1 H31 | GTAAGTTTCAAATATCT | 2251 | OPA1 H31 | AAGGTTTTAAAAAAATA |
| | 3UTR(+2761+2777) | | | 3UTR(+2815+2831) | |
| 2234 | OPA1 H31 | AAGGTAAGTTTCAAATA | 2252 | OPA1 H31 | GTGAAGGTTTTAAAAAA |
| | 3UTR(+2764+2780) | | | 3UTR(+2818+2834) | |
| 2235 | OPA1 H31 | AACAAGGTAAGTTTCAA | 2253 | OPA1 H31 | AATGTGAAGGTTTTAAA |
| | 3UTR(+2767+2783) | | | 3UTR(+2821+2837) | |
| 2236 | OPA1 H31 | GAAAACAAGGTAAGTTT | 2254 | OPA1 H31 | CGTAATGTGAAGGTTTT |
| | 3UTR(+2770+2786) | | | 3UTR(+2824+2840) | |
| 2237 | OPA1 H31 | AGTGAAAACAAGGTAAG | 2255 | OPA1 H31 | ACACGTAATGTGAAGGT |
| | 3UTR(+2773+2789) | | | 3UTR(+2827+2843) | |
| 2238 | OPA1 H31 | ACAAGTGAAAACAAGGT | 2256 | OPA1 H31 | TCTACACGTAATGTGAA |
| | 3UTR(+2776+2792) | | | 3UTR(+2830+2846) | |
| 2239 | OPA1 H31 | TGCACAAGTGAAAACAA | 2257 | OPA1 H31 | ATATCTACACGTAATGT |
| | 3UTR(+2779+2795) | | | 3UTR(+2833+2849) | |
| 2240 | OPA1 H31 | CAGTGCACAAGTGAAAA | 2258 | OPA1 H31 | ATAATATCTACACGTAA |
| | 3UTR(+2782+2798) | | | 3UTR(+2836+2852) | |
| 2241 | OPA1 H31 | TCACAGTGCACAAGTGA | 2259 | OPA1 H31 | GCAATAATATCTACACG |
| | 3UTR(+2785+2801) | | | 3UTR(+2839+2855) | |
| 2242 | OPA1 H31 | CATTCACAGTGCACAAG | 2260 | OPA1 H31 | GTTGCAATAATATCTAC |
| | 3UTR(+2788+2804) | | | 3UTR(+2842+2858) | |
| 2261 | OPA1 H31 | TAAGTTGCAATAATATC | 2279 | OPA1 H31 | ATTTTTTAATTACTCAT |
| | 3UTR(+2845+2861) | | | 3UTR(+2899+2915) | |
| 2262 | OPA1 H31 | ATATAAGTTGCAATAAT | 2280 | OPA1 H31 | AATATTTTTTAATTACT |
| | 3UTR(+2848+2864) | | | 3UTR(+2902+2918) | |
| 2263 | OPA1 H31 | AAAATATAAGTTGCAAT | 2281 | OPA1 H31 | TTAAATATTTTTTAATT |
| | 3UTR(+2851+2867) | | | 3UTR(+2905+2921) | |
| 2264 | OPA1 H31 | GGCAAAATATAAGTTGC | 2282 | OPA1 H31 | GATTTAAATATTTTTTA |
| | 3UTR(+2854+2870) | | | 3UTR(+2908+2924) | |
| 2265 | OPA1 H31 | TCAGGCAAAATATAAGT | 2283 | OPA1 H31 | TGTGATTTAAATATTTT |
| | 3UTR(+2857+2873) | | | 3UTR(+2911+2927) | |
| 2266 | OPA1 H31 | AGCTCAGGCAAAATATA | 2284 | OPA1 H31 | TAATGTGATTTAAATAT |
| | 3UTR(+2860+2876) | | | 3UTR(+2914+2930) | |
| 2267 | OPA1 H31 | TCAAGCTCAGGCAAAAT | 2285 | OPA1 H31 | TTATAATGTGATTTAAA |
| | 3UTR(+2863+2879) | | | 3UTR(+2917+2933) | |
| 2268 | OPA1 H31 | TGATCAAGCTCAGGCAA | 2286 | OPA1 H31 | GAATTATAATGTGATTT |
| | 3UTR(+2866+2882) | | | 3UTR(+2920+2936) | |
| 2269 | OPA1 H31 | CTTTGATCAAGCTCAGG | 2287 | OPA1 H31 | ATAGAATTATAATGTGA |
| | 3UTR(+2869+2885) | | | 3UTR(+2923+2939) | |
| 2270 | OPA1 H31 | GACCTTTGATCAAGCTC | 2288 | OPA1 H31 | ATAATAGAATTATAATG |
| | 3UTR(+2872+2888) | | | 3UTR(+2926+2942) | |
| 2271 | OPA1 H31 | AATGACCTTTGATCAAG | 2289 | OPA1 H31 | CCAATAATAGAATTATA |
| | 3UTR(+2875+2891) | | | 3UTR(+2929+2945) | |
| 2272 | OPA1 H31 | ACAAATGACCTTTGATC | 2290 | OPA1 H31 | TCTCCAATAATAGAATT |
| | 3UTR(+2878+2894) | | | 3UTR(+2932+2948) | |
| 2273 | OPA1 H31 | TACACAAATGACCTTTG | 2291 | OPA1 H31 | TGCTCTCCAATAATAGA |
| | 3UTR(+2881+2897) | | | 3UTR(+2935+2951) | |
| 2274 | OPA1 H31 | ATCTACACAAATGACCT | 2292 | OPA1 H31 | AGATGCTCTCCAATAAT |
| | 3UTR(+2884+2900) | | | 3UTR(+2938+2954) | |
| 2275 | OPA1 H31 | CTCATCTACACAAATGA | 2293 | OPA1 H31 | AAAAGATGCTCTCCAAT |
| | 3UTR(+2887+2903) | | | 3UTR(+2941+2957) | |
| 2276 | OPA1 H31 | TTACTCATCTACACAAA | 2294 | OPA1 H31 | TTTAAAAGATGCTCTCC |
| | 3UTR(+2890+2906) | | | 3UTR(+2944+2960) | |
| 2277 | OPA1 H31 | TAATTACTCATCTACAC | 2295 | OPA1 H31 | AAATTTAAAAGATGCTC |
| | 3UTR(+2893+2909) | | | 3UTR(+2947+2963) | |
| 2278 | OPA1 H31 | TTTTAATTACTCATCTA | 2296 | OPA1 H31 | AAAAAATTTAAAAGATG |
| | 3UTR(+2896+2912) | | | 3UTR(+2950+2966) | |
| 2297 | OPA1 H31 | AGAAAAAAATTTAAAAG | 2315 | OPA1 H31 | ATGGGGTCAAATAATGA |
| | 3UTR(+2953+2969) | | | 3UTR(+3007+3023) | |
| 2298 | OPA1 H31 | AACAGAAAAAAATTTAA | 2316 | OPA1 H31 | ACTATGGGGTCAAATAA |
| | 3UTR(+2956+2972) | | | 3UTR(+3010+3026) | |
| 2299 | OPA1 H31 | TAAAACAGAAAAAAATT | 2317 | OPA1 H31 | TATACTATGGGGTCAAA |
| | 3UTR(+2959+2975) | | | 3UTR(+3013+3029) | |
| 2300 | OPA1 H31 | CGTTAAAACAGAAAAAA | 2318 | OPA1 H31 | GGTTATACTATGGGGTC |
| | 3UTR(+2962+2978) | | | 3UTR(+3016+3032) | |
| 2301 | OPA1 H31 | CCTCGTTAAAACAGAAA | 2319 | OPA1 H31 | TCTGGTTATACTATGGG |
| | 3UTR(+2965+2981) | | | 3UTR(+3019+3035) | |
| 2302 | OPA1 H31 | TTCCCTCGTTAAAACAG | 2320 | OPA1 H31 | GAATCTGGTTATACTAT |
| | 3UTR(+2968+2984) | | | 3UTR(+3022+3038) | |
| 2303 | OPA1 H31 | TCTTTCCCTCGTTAAAA | 2321 | OPA1 H31 | CATGAATCTGGTTATAC |
| | 3UTR(+2971+2987) | | | 3UTR(+3025+3041) | |
| 2304 | OPA1 H31 | TTCTCTTTCCCTCGTTA | 2322 | OPA1 H31 | GACCATGAATCTGGTTA |
| | 3UTR(+2974+2990) | | | 3UTR(+3028+3044) | |
| 2305 | OPA1 H31 | GGTTTCTCTTTCCCTCG | 2323 | OPA1 H31 | TTAGACCATGAATCTGG |
| | 3UTR(+2977+2993) | | | 3UTR(+3031+3047) | |
| 2306 | OPA1 H31 | ACAGGTTTCTCTTTCCC | 2324 | OPA1 H31 | TTGTTAGACCATGAATC |
| | 3UTR(+2980+2996) | | | 3UTR(+3034+3050) | |
| 2307 | OPA1 H31 | TATACAGGTTTCTCTTT | 2325 | OPA1 H31 | AGCTTGTTAGACCATGA |
| | 3UTR(+2983+2999) | | | 3UTR(+3037+3053) | |
| 2308 | OPA1 H31 | AGGTATACAGGTTTCTC | 2326 | OPA1 H31 | GAGAGCTTGTTAGACCA |
| | 3UTR(+2986+3002) | | | 3UTR(+3040+3056) | |
| 2309 | OPA1 H31 | CCTAGGTATACAGGTTT | 2327 | OPA1 H31 | ACTGAGAGCTTGTTAGA |
| | 3UTR(+2989+3005) | | | 3UTR(+3043+3059) | |
| 2310 | OPA1 H31 | GACCCTAGGTATACAGG | 2328 | OPA1 H31 | CACACTGAGAGCTTGTT |
| | 3UTR(+2992+3008) | | | 3UTR(+3046+3062) | |
| 2311 | OPA1 H31 | AATGACCCTAGGTATAC | 2329 | OPA1 H31 | AGCCACACTGAGAGCTT |
| | 3UTR(+2995+3011) | | | 3UTR(+3049+3065) | |
| 2312 | OPA1 H31 | AATAATGACCCTAGGTA | 2330 | OPA1 H31 | AAAAGCCACACTGAGAG |
| | 3UTR(+2998+3014) | | | 3UTR(+3052+3068) | |
| 2313 | OPA1 H31 | TCAAATAATGACCCTAG | 2331 | OPA1 H31 | GAGAAAAGCCACACTGA |
| | 3UTR(+3001+3017) | | | 3UTR(+3055+3071) | |
| 2314 | OPA1 H31 | GGGTCAAATAATGACCC | 2332 | OPA1 H31 | TCAGAGAAAAGCCACAC |
| | 3UTR(+3004+3020) | | | 3UTR(+3058+3074) | |
| 2333 | OPA1 H31 | CATTCAGAGAAAAGCCA | 2351 | OPA1 H31 | GCACCGGTTGACCATGG |
| | 3UTR(+3061+3077) | | | 3UTR(+3115+3131) | |
| 2334 | OPA1 H31 | AAGCATTCAGAGAAAAG | 2352 | OPA1 H31 | AAAGCACCGGTTGACCA |
| | 3UTR(+3064+3080) | | | 3UTR(+3118+3134) | |
| 2335 | OPA1 H31 | TTCAAGCATTCAGAGAA | 2353 | OPA1 H31 | AAAAAAGCACCGGTTGA |
| | 3UTR(+3067+3083) | | | 3UTR(+3121+3137) | |
| 2336 | OPA1 H31 | AAATTCAAGCATTCAGA | 2354 | OPA1 H31 | TGAAAAAAAGCACCGGT |
| | 3UTR(+3070+3086) | | | 3UTR(+3124+3140) | |
| 2337 | OPA1 H31 | GTGAAATTCAAGCATTC | 2355 | OPA1 H31 | ATGTGAAAAAAAGCACC |
| | 3UTR(+3073+3089) | | | 3UTR(+3127+3143) | |
| 2338 | OPA1 H31 | CATGTGAAATTCAAGCA | 2356 | OPA1 H31 | ACGATGTGAAAAAAAGC |
| | 3UTR(+3076+3092) | | | 3UTR(+3130+3146) | |
| 2339 | OPA1 H31 | AGGCATGTGAAATTCAA | 2357 | OPA1 H31 | ACCACGATGTGAAAAAA |
| | 3UTR(+3079+3095) | | | 3UTR(+3133+3149) | |
| 2340 | OPA1 H31 | GCAAGGCATGTGAAATT | 2358 | OPA1 H31 | AGTACCACGATGTGAAA |
| | 3UTR(+3082+3098) | | | 3UTR(+3136+3152) | |
| 2341 | OPA1 H31 | AATGCAAGGCATGTGAA | 2359 | OPA1 H31 | ACAAGTACCACGATGTG |
| | 3UTR(+3085+3101) | | | 3UTR(+3139+3155) | |
| 2342 | OPA1 H31 | TGAAATGCAAGGCATGT | 2360 | OPA1 H31 | TTGACAAGTACCACGAT |
| | 3UTR(+3088+3104) | | | 3UTR(+3142+3158) | |
| 2343 | OPA1 H31 | CTGTGAAATGCAAGGCA | 2361 | OPA1 H31 | GTTTTGACAAGTACCAC |
| | 3UTR(+3091+3107) | | | 3UTR(+3145+3161) | |
| 2344 | OPA1 H31 | CAACTGTGAAATGCAAG | 2362 | OPA1 H31 | AATGTTTTGACAAGTAC |
| | 3UTR(+3094+3110) | | | 3UTR(+3148+3164) | |
| 2345 | OPA1 H31 | GTACAACTGTGAAATGC | 2363 | OPA1 H31 | CAAAATGTTTTGACAAG |
| | 3UTR(+3097+3113) | | | 3UTR(+3151+3167) | |
| 2346 | OPA1 H31 | GGAGTACAACTGTGAAA | 2364 | OPA1 H31 | TAACAAAATGTTTTGAC |
| | 3UTR(+3100+3116) | | | 3UTR(+3154+3170) | |
| 2347 | OPA1 H31 | CATGGAGTACAACTGTG | 2365 | OPA1 H31 | AAATAACAAAATGTTTT |
| | 3UTR(+3103+3119) | | | 3UTR(+3157+3173) | |
| 2348 | OPA1 H31 | GACCATGGAGTACAACT | 2366 | OPA1 H31 | GGAAAATAACAAAATGT |
| | 3UTR(+3106+3122) | | | 3UTR(+3160+3176) | |
| 2349 | OPA1 H31 | GTTGACCATGGAGTACA | 2367 | OPA1 H31 | CAAGGAAAATAACAAAA |
| | 3UTR(+3109+3125) | | | 3UTR(+3163+3179) | |
| 2350 | OPA1 H31 | CCGGTTGACCATGGAGT | 2368 | OPA1 H31 | TACCAAGGAAAATAACA |
| | 3UTR(+3112+3128) | | | 3UTR(+3166+3182) | |
| 2369 | OPA1 H31 | TTTTACCAAGGAAAATA | 2388 | OPA1 H31 3UTR(−15−31) | ATTAATGAAAATGACAG |
| | 3UTR(+3169+3185) | | | | |
| 2370 | OPA1 H31 | ATATTTTACCAAGGAAA | 2389 | OPA1 H31 3UTR(−18−34) | AGCATTAATGAAAATGA |
| | 3UTR(+3172+3188) | | | | |
| 2371 | OPA1 H31 | TATATATTTTACCAAGG | 2390 | OPA1 H31 3UTR(−21−37) | GGCAGCATTAATGAAAA |
| | 3UTR(+3175+3191) | | | | |
| 2372 | OPA1 H31 | TTTTATATATTTTACCA | 2391 | OPA1 H31 3UTR(−24−40) | GTTGGCAGCATTAATGA |
| | 3UTR(+3178+3194) | | | | |
| 2373 | OPA1 H31 | CTTTTTTATATATTTTA | 2392 | OPA1 H31 3UTR(−27−43) | CATGTTGGCAGCATTAA |
| | 3UTR(+3181+3197) | | | | |
| 2374 | OPA1 H31 | AACCTTTTTTATATATT | 2393 | OPA1 H31 3UTR(−30−46) | GAACATGTTGGCAGCAT |
| | 3UTR(+3184+3200) | | | | |
| 2375 | OPA1 H31 | GAAAACCTTTTTTATAT | 2394 | OPA1 H31 3UTR(−33−49) | TATGAACATGTTGGCAG |
| | 3UTR(+3187+3203) | | | | |
| 2376 | OPA1 H31 | TTAGAAAACCTTTTTTA | 2395 | OPA1 H31 3UTR(−36−52) | TCATATGAACATGTTGG |
| | 3UTR(+3190+3206) | | | | |
| 2377 | OPA1 H31 | AAATTAGAAAACCTTTT | 2396 | OPA1 H31 3UTR(−39−55) | GCCTCATATGAACATGT |
| | 3UTR(+3193+3209) | | | | |
| 2378 | OPA1 H31 | GTGAAATTAGAAAACCT | 2397 | OPA1 H31 3UTR(−42−58) | TAAGCCTCATATGAACA |
| | 3UTR(+3196+3212) | | | | |
| 2379 | OPA1 H31 | AAAGTGAAATTAGAAAA | 2398 | OPA1 H31 3UTR(−45−61) | TAGTAAGCCTCATATGA |
| | 3UTR(+3199+3215) | | | | |
| 2380 | OPA1 H31 | AGCAAAGTGAAATTAGA | 2399 | OPA1 H31 3UTR(−48−64) | TCTTAGTAAGCCTCATA |
| | 3UTR(+3202+3218) | | | | |
| 2381 | OPA1 H31 | GGCAGCAAAGTGAAATT | 2400 | OPA1 H31 3UTR(−51−67) | ACTTCTTAGTAAGCCTC |
| | 3UTR(+3205+3221) | | | | |
| 2382 | OPA1 H31 | CTTGGCAGCAAAGTGAA | 2401 | OPA1 H31 3UTR(−54−70) | ATAACTTCTTAGTAAGC |
| | 3UTR(+3208+3224) | | | | |
| 2383 | OPA1 H31 3UTR | AGCCTTGGCAGCAAAGT | 2402 | OPA1 H31 3UTR(−57−73) | GTTATAACTTCTTAGTA |
| | (+3211−16) | | | | |
| 2384 | OPA1 H31 3UTR(−3−19) | GACAGCCTTGGCAGCAA | 2403 | OPA1 H31 3UTR(−60−76) | TTAGTTATAACTTCTTA |
| 2385 | OPA1 H31 3UTR(−6−22) | AATGACAGCCTTGGCAG | 2404 | OPA1 H31 3UTR(−63−79) | AGCTTAGTTATAACTTC |
| 2386 | OPA1 H31 3UTR(−9−25) | GAAAATGACAGCCTTGG | 2405 | OPA1 H31 3UTR(−66−82) | TAAAGCTTAGTTATAAC |
| 2387 | OPA1 H31 3UTR(−12−28) | AATGAAAATGACAGCCT | 2406 | OPA1 H31 3UTR(−69−85) | TTCTAAAGCTTAGTTAT |
| 2407 | OPA1 H31 3UTR(−72−88) | CAGTTCTAAAGCTTAGT | 2425 | OPA1 H31 3UTR | AAAGTGAGTAACAGGAG |
| | | | | (−126−142) | |
| 2408 | OPA1 H31 3UTR(−75−91) | TTCCAGTTCTAAAGCTT | 2426 | OPA1 H31 3UTR | AACAAAGTGAGTAACAG |
| | | | | (−129−145) | |
| 2409 | OPA1 H31 3UTR(−78−94) | CTCTTCCAGTTCTAAAG | 2427 | OPA1 H31 3UTR | AATAACAAAGTGAGTAA |
| | | | | (−132−148) | |
| 2410 | OPA1 H31 3UTR(−81−97) | AGTCTCTTCCAGTTCTA | 2428 | OPA1 H31 3UTR | AGGAATAACAAAGTGAG |
| | | | | (−135−151) | |
| 2411 | OPA1 H31 3UTR(−84−100) | TAAAGTCTCTTCCAGTT | 2429 | OPA1 H31 3UTR | TGGAGGAATAACAAAGT |
| | | | | (−138−154) | |
| 2412 | OPA1 H31 3UTR(−87−103) | AATTAAAGTCTCTTCCA | 2430 | OPA1 H31 3UTR | TTCTGGAGGAATAACAA |
| | | | | (−141−157) | |
| 2413 | OPA1 H31 3UTR(−90−106) | TGAAATTAAAGTCTCTT | 2431 | OPA1 H31 3UTR | AAGTTCTGGAGGAATAA |
| | | | | (−144−160) | |
| 2414 | OPA1 H31 3UTR(−93−109) | AGATGAAATTAAAGTCT | 2432 | OPA1 H31 3UTR | GCAAAGTTCTGGAGGAA |
| | | | | (−147−163) | |
| 2415 | OPA1 H31 3UTR(−96−112) | GGTAGATGAAATTAAAG | 2433 | OPA1 H31 3UTR | TGAGCAAAGTTCTGGAG |
| | | | | (−150−166) | |
| 2416 | OPA1 H31 3UTR(−99−115) | GATGGTAGATGAAATTA | 2434 | OPA1 H31 3UTR | TTATGAGCAAAGTTCTG |
| | | | | (−153−169) | |
| 2417 | OPA1 H31 3UTR(−102−118) | TCAGATGGTAGATGAAA | 2435 | OPA1 H31 3UTR | CATTTATGAGCAAAGTT |
| | | | | (−156−172) | |
| 2418 | OPA1 H31 3UTR(−105−121) | TAATCAGATGGTAGATG | 2436 | OPA1 H31 3UTR | TATCATTTATGAGCAAA |
| | | | | (−159−175) | |
| 2419 | OPA1 H31 3UTR(−108−124) | TTATAATCAGATGGTAG | 2437 | OPA1 H31 3UTR | AGGTATCATTTATGAGC |
| | | | | (−162−178) | |
| 2420 | OPA1 H31 3UTR(−111−127) | AGTTTATAATCAGATGG | 2438 | OPA1 H31 3UTR | AGTAGGTATCATTTATG |
| | | | | (−165−181) | |
| 2421 | OPA1 H31 3UTR(−114−130) | AGGAGTTTATAATCAGA | 2439 | OPA1 H31 3UTR | ATTAGTAGGTATCATTT |
| | | | | (−168−184) | |
| 2422 | OPA1 H31 3UTR(−117−133) | AACAGGAGTTTATAATC | 2440 | OPA1 H31 3UTR | ACAATTAGTAGGTATCA |
| | | | | (−171−187) | |
| 2423 | OPA1 H31 3UTR(−120−136) | AGTAACAGGAGTTTATA | 2441 | OPA1 H31 3UTR | TCGACAATTAGTAGGTA |
| | | | | (−174−190) | |
| 2424 | OPA1 H31 3UTR(−123−139) | GTGAGTAACAGGAGTTT | 2442 | OPA1 H31 3UTR | TGATCGACAATTAGTAG |
| | | | | (−177−193) | |
| 2443 | OPA1 H31 3UTR(−180−196) | CAATGATCGACAATTAG | 2461 | OPA1 H31 3UTR | ATCTTCTGAAGGAATTA |
| | | | | (−234−250) | |
| 2444 | OPA1 H31 3UTR(−183−199) | ATCCAATGATCGACAAT | 2462 | OPA1 H31 3UTR | TGCATCTTCTGAAGGAA |
| | | | | (−237−253) | |
| 2445 | OPA1 H31 3UTR(−186−202) | CATATCCAATGATCGAC | 2463 | OPA1 H31 3UTR | CTCTGCATCTTCTGAAG |
| | | | | (−240−256) | |
| 2446 | OPA1 H31 3UTR(−189−205) | TGACATATCCAATGATC | 2464 | OPA1 H31 3UTR | TGCCTCTGCATCTTCTG |
| | | | | (−243−259) | |
| 2447 | OPA1 H31 3UTR(−192−208) | ACTTGACATATCCAATG | 2465 | OPA1 H31 3UTR | TCTTGCCTCTGCATCTT |
| | | | | (−246−262) | |
| 2448 | OPA1 H31 3UTR(−195−211) | CTAACTTGACATATCCA | 2466 | OPA1 H31 3UTR | TGTTCTTGCCTCTGCAT |
| | | | | (−249−265) | |
| 2449 | OPA1 H31 3UTR(−198−214) | TACCTAACTTGACATAT | 2467 | OPA1 H31 3UTR | ACATGTTCTTGCCTCTG |
| | | | | (−252−268) | |
| 2450 | OPA1 H31 3UTR(−201−217) | CGCTACCTAACTTGACA | 2468 | OPA1 H31 3UTR | GAAACATGTTCTTGCCT |
| | | | | (−255−271) | |
| 2451 | OPA1 H31 3UTR(−204−220) | ATACGCTACCTAACTTG | 2469 | OPA1 H31 3UTR | ATTGAAACATGTTCTTG |
| | | | | (−258−274) | |
| 2452 | OPA1 H31 3UTR(−207−223) | CCTATACGCTACCTAAC | 2470 | OPA1 H31 3UTR | ACGATTGAAACATGTTC |
| | | | | (−261−277) | |
| 2453 | OPA1 H31 3UTR(−210−226) | ACACCTATACGCTACCT | 2471 | OPA1 H31 3UTR | AACACGATTGAAACATG |
| | | | | (−264−280) | |
| 2454 | OPA1 H31 3UTR(−213−229) | GGCACACCTATACGCTA | 2472 | OPA1 H31 3UTR | GCTAACACGATTGAAAC |
| | | | | (−267−283) | |
| 2455 | OPA1 H31 3UTR(−216−232) | GAAGGCACACCTATACG | 2473 | OPA1 H31 3UTR | AATGCTAACACGATTGA |
| | | | | (−270−286) | |
| 2456 | OPA1 H31 3UTR(−219−235) | TAAGAAGGCACACCTAT | 2474 | OPA1 H31 3UTR | ACCAATGCTAACACGAT |
| | | | | (−273−289) | |
| 2457 | OPA1 H31 3UTR(−222−238) | AATTAAGAAGGCACACC | 2475 | OPA1 H31 3UTR | AAAACCAATGCTAACAC |
| | | | | (−276−292) | |
| 2458 | OPA1 H31 3UTR(−225−241) | AGGAATTAAGAAGGCAC | 2476 | OPA1 H31 3UTR | AAGAAAACCAATGCTAA |
| | | | | (−279−295) | |
| 2459 | OPA1 H31 3UTR(−228−244) | TGAAGGAATTAAGAAGG | 2477 | OPA1 H31 3UTR | ATAAAGAAAACCAATGC |
| | | | | (−282−298) | |
| 2460 | OPA1 H31 3UTR(−231−247) | TTCTGAAGGAATTAAGA | 2478 | OPA1 H31 3UTR | CTGATAAAGAAAACCAA |
| | | | | (−285−301) | |
| 2479 | OPA1 H31 3UTR(−288−304) | GCACTGATAAAGAAAAC | 2484 | OPA1 H31 3UTR | ACACTGAGTCTGTTAGC |
| | | | | (−303−319) | |
| 2480 | OPA1 H31 3UTR(−291−307) | TTAGCACTGATAAAGAA | 2485 | OPA1 H31 3UTR | CTCACACTGAGTCTGTT |
| | | | | (−306−322) | |
| 2481 | OPA1 H31 3UTR(−294−310) | CTGTTAGCACTGATAAA | 2486 | OPA1 H31 3UTR | GGCCTCACACTGAGTCT |
| | | | | (−309−325) | |
| 2482 | OPA1 H31 3UTR(−297−313) | AGTCTGTTAGCACTGAT | 2487 | OPA1 H31 3UTR | TGGGGCCTCACACTGAG |
| | | | | (−312−328) | |
| 2483 | OPA1 H31 3UTR(−300−316) | CTGAGTCTGTTAGCACT | 2488 | OPA1 H31 3UTR | GTATGGGGCCTCACACT |
| | | | | (−315−331) | |

SEQ ID: 2489: OPA1 transcript cDNA sequence (NM_130837)
AGGCTCTTGCGGAAGTCCATGCGCCATTGGGAGGGCCTCGGCCGCGGCTCTGTGCCCTTGCTGCTGAGGGCCACTTCCTGGGTCATTCCTGGACCGGGAGCC
GGGCTGGGGCTCACACGGGGGCTCCCGCGTGGCCGTCTCGGCGCCTGCGTGACCTCCCCGCCGGCGGGATGTGGCGACTACGTCGGGCCGCTGTGGCCTGTG
AGGTCTGCCAGTCTTTAGTGAAACACAGCTCTGGAATAAAAGGAAGTTTACCACTACAAAAACTACATCTGGTTTCACGAAGCATTTATCATTCACATCATC
CTACCTTAAAGCTTCAACGACCCCAATTAAGGACATCCTTTCAGCAGTTCTCTTCTCTGACAAACCTTCCTTTACGTAAACTGAAATTCTCTCCAATTAAATAT
GGCTACCAGCCTCGCAGGAATTTTTGGCCAGCAAGATTAGCTACGAGACTCTTAAAACTTCGCTATCTCATACTAGGATCGGCTGTTGGGGGTGGCTACACA
GCCAAAAAGACTTTTGATCAGTGGAAAGATATGATACCGGACCTTAGTGAATATAAATGGATTGTGCCTGACATTGTGTGGGAAATTGATGAGTATATCGAT
TTTGAGAAAATTAGAAAAGCCCTTCCTAGTTCAGAAGACCTTGTAAAGTTAGCACCAGACTTTGACAAGATTGTTGAAAGCCTTAGCTTATTGAAGGACTTT
TTTACCTCAGGTCACAAATTGGTTAGTGAAGTCATAGGAGCTTCTGACCTACTTCTCTTGTTAGGTTCTCCGGAAGAAACGGCGTTTAGAGCAACAGATCGTG
GATCTGAAAGTGACAAGCATTTTAGAAAGGGTCTGCTTGGTGAGCTCATTCTCTTACAACAACAAATTCAAGAGCATGAAGAGGAAGCGCGCAGAGCCGCT
GGCCAATATAGCACGAGCTATGCCCAACAGAAGCGCAAGGTGTCAGACAAAGAGAAAATTGACCAACTTCAGGAAGAACTTCTGCACACTCAGTTGAAGTA
TCAGAGAATCTTGGAACGATTAGAAAAGGAGAACAAAGAATTGAGAAAATTAGTATTGCAGAAAGATGACAAAGGCATTCATCATAGAAAGCTTAAGAAA
TCTTTGATTGACATGTATTCTGAAGTTCTTGATGTTCTCTCTGATTATGATGCCAGTTATAATACGCAAGATCATCTGCCACGGGTTGTTGTGGTTGGAGATCA
GAGTGCTGGAAAGACTAGTGTGTTGGAAATGATTGCCCAAGCTCGAATATTCCCAAGAGGATCTGGGGAGATGATGACACGTTCTCCAGTTAAGGTGACTCT
GAGTGAAGGTCCTCACCATGTGGCCCTATTTAAAGATAGTTCTCGGGAGTTTGATCTTACCAAAGAAGAAGATCTTGCAGCATTAAGACATGAAATAGAACT
TCGAATGAGGAAAAATGTGAAAGAAGGCTGTACCGTTAGCCCTGAGACCATATCCTTAAATGTAAAAGGCCCTGGACTACAGAGGATGGTGCTTGTTGACT
TACCAGGTGTGATTAATACTGTGACATCAGGCATGGCTCCTGACACAAAGGAAACTATTTTCAGTATCAGCAAAGCTTACATGCAGAATCCTAATGCCATCA
TACTGTGTATTCAAGATGGATCTGTGGATGCTGAACGCAGTATTGTTACAGACTTGGTCAGTCAAATGGACCCTCATGGAAGGAGAACCATATTCGTTTTGA
CCAAAGTAGACCTGGCAGAGAAAAATGTAGCCAGTCCAAGCAGGATTCAGCAGATAATTGAAGGAAAGCTCTTCCCAATGAAAGCTTTAGGTTATTTTGCT
GTTGTAACAGGAAAAGGGAACAGCTCTGAAAGCATTGAAGCTATAAGAGAATATGAAGAAGAGTTTTTTCAGAATTCAAAGCTCCTAAAGACAAGCATGCT
AAAGGCACACCAAGTGACTACAAGAAATTTAAGCCTTGCAGTATCAGACTGCTTTTGGAAAATGGTACGAGAGTCTGTTGAACAACAGGCTGATAGTTTCA
AAGCAACACGTTTTAACCTTGAAACTGAATGGAAGAATAACTATCCTCGCCTGCGGGAACTTGACCGGAATGAACTATTTGAAAAAGCTAAAAATGAAATC
CTTGATGAAGTTATCAGTCTGAGCCAGGTTACACCAAAACATTGGGAGGAAATCCTTCAACAATCTTTGTGGGAAAGAGTATCAACTCATGTGATTGAAAAC
ATCTACCTTCCAGCTGCGCAGACCATGAATTCAGGAACTTTTAACACCACAGTGGATATCAAGCTTAAACAGTGGACTGATAAACAACTTCCTAATAAAGCA
GTAGAGGTTGCTTGGGAGACCCTACAAGAAGAATTTTCCCGCTTTATGACAGAACCGAAAGGGAAAGAGCATGATGACATATTTGATAAACTTAAAGAGGC
TGTTAAGGAAGAAAGTATTAAACGACACAAGTGGAATGACTTTGCGGAGGACAGCTTGAGGGTTATTCAACACAATGCTTTGGAAGACCGATCCATATCTG
ATAAACAGCAATGGGATGCAGCTATTTATTTTATGGAAGAGGCTCTGCAGGCTCGTCTCAAGGATACTGAAAATGCAATTGAAAACATGGTGGGTCCAGAC
TGGAAAAAGAGGTGGTTATACTGGAAGAATCGGACCCAAGAACAGTGTGTTCACAATGAAACCAAGAATGAATTGGAGAAGATGTTGAAATGTAATGAGG
AGCACCCAGCTTATCTTGCAAGTGATGAAATAACCACAGTCCGGAAGAACCTTGAATCCCGAGGAGTAGAAGTAGATCCAAGCTTGATTAAGGATACTTGG
CATCAAGTTTATAGAAGACATTTTTTAAAAACAGCTCTAAACCATTGTAACCTTTGTCGAAGAGGTTTTTATTACTACCAAAGGCATTTTGTAGATTCTGAGT
TGGAATGCAATGATGTGGTCTTGTTTTGGCGTATACAGCGCATGCTTGCTATCACCGCAAATACTTTAAGGCAACAACTTACAAATACTGAAGTTAGGCGAT
TAGAGAAAAATGTTAAAGAGGTATTGGAAGATTTTGCTGAAGATGGTGAGAAGAAGATTAAATTGCTTACTGGTAAACGCGTTCAACTGGCGGAAGACCTC
AAGAAAGTTAGAGAAATTCAAGAAAAACTTGATGCTTTCATTGAAGCTCTTCATCAGGAGAAATAAATTAAAATCGTACTCATAATCAGCTCTGCATACATC
TGAAGAACAAAAACATCAACGTCTTTTGTCCAGCCTCTTTTTCTTCTGCTGTTCCACCTTTCTAAACATACAATAAAGTCATGGGATAAAAATAATCGATGTA
TGTTACGGGCGCTTTAACCATCAGCTGCCTCTCGAATGGAAGAACAGTGGTAATGGATTAACATCCTATTTTGTTGTACTAAAGTGACAAATCGGAATAATA
TAATTGGTATGGCCATTAGGTTCAGTCCTTGAAGATAAGAAACTTGTTCTCTGTTTGTTGTCTTATTTGTGGTGGCACTCGTTTAATGGATTAACTGAGGTTGC
TCAATGTTCAGTTTCTTTTCCAGAAATACAATGCTAGGTGTTTTGAAATAAAACTTATATAGCAATTGTTTAAAGTTATCAATTGTATATAAAATCACAGTAG
CCTGCTAAATCATTGTATGTGTCTGTAGTATTCTATTCCCAGAAACTATTTGACCATGATAATTCAGTTTATATTCACCACATGAAAGAAAAATGGGTAACAG
AAGAACCCTTAAAACAGGTTAATTTGGATTGTAACGTTCAGTGAAAGAAATTTCAACCCTTCATAGCCAGCGAAGAAATTTGCCTTGGAAGCCAAGTCAGTA
CCAGCTTACCTATTTGATTCAGTTGCTGTTTTCTCACTCTCTATATCCATTTGAAATTGATTTATTTTAGATGTTGTATACTTACGTTAGGCTTTCTGTTAATAG
TGGTTTTTCTCCTGTTGACAGAGCCACCGGATTATGACACAGGATGAGGAAGATTAAGGATAATCAATTGACTAATTTCATTTAGAATATTATCAAACATTTC
AACTAGGTATCAGAAAAAGGCTTTCTTTCATAAGACTATTTTAAATAGAAATTATTTCAACAATTAAAGTAATGTTGACCATCCCCCTCTCAGCTGAATAAA
GAAAAATTTAGTTCAATTTATTGCAATTTAATTACAATACTACCTTCACAACATTTTCATGTGTTTTAAATAAATATTTTTTAATTGGCTAAAGGACATTCAAG
CAAAGAAATGCTTTCTTTACTTAAAATGTCTATCTCATTTGCTGCCTTTTCACTAAGCCTTTACTTTGTTAATAAAAGTGTCCATTGTGTGATGTTTTTGATTTT
ACAGTTTGCTAAATCTTATTTTCTTGGAGTTGCTTTTTGGTAACAGCCCCATTGCTACTCCCCATTTTATTGTTTTACATCAATGCATGCTTCGTTGTGATCCCT
CAAGATGTAACACTTGGTATGCTCGGTTGAGGATATGAAAAAATACTTCCGAAACCAGGAATTCAATGTATGTTTGTTTTATACTGTTTGATAAGAAAAGTA
GGTCCAGCCTTAAGCAGCACAGATGCGCTGGTAGATGCATAGTCAGGAACTTTTTTTATTTCTTTTAGGTCTAGGGACAGGAGTGAATAGAAAGGGAGGAG
AGCTCTATTATGTTCTATACACAGATTAGGAGATGACCTTACTGGGTACACCCCTCTAACCAGTGCTTACAGGTTAATGCATGTTAATGAATATTTTTGCAGT
TGTAAAGCATAACAATTACAACTACACATCTATTTCTAAAGAATAAAACAGGACCATATTTATTTACTTCTGTCAACTATAGAAAGAAAGACCTTCAGCTGT
ATTTCCACAGATTTCTCCCAAGGAAAAGGCTAATATTAGTCACTACTGTTATCACATCCCTTTGTATAAGTTTTAAAAAGAGATGGAGGGAGATCTTCATTTC
TTTGAGGAGATCAGTATTGTAACGTATGTGAATAGATGATAACAATTAATATTACTAAAAGTCCCACATGAGAGTCCTGACGCCCTCTCCATGCCCCACAGT
AATGTGGCTTCTTTCATGGGTTTTTTTTTCTTCTTTTTAGCTGATCTCATCCTAAGCATGCTTTATTTTTCCTTGAAAGCTAGGTATTTATCAACTGCAGATGTT
ATTGAAAGAAAATAAAATTCAGTCTCAAGAGTAAACCCTGTGTCTTGTGTCTGTAGTTCAAAAGTCAGAAATGATTCTAATTTAAACAAAAAGATACTAAAT
ATACAGAAGTTAAATTCGAACTAGCCACAGAATCATTTGTTTTTATGTCAGAATTTGCAAAGAGTGGAGTGGACAAAGCTCTGTATGGAAGACTGAACAACT
GTAAATAGATGATATCCAAACTTAATTTGGCTAGGACTTCAATTTTAAAAATCAGTGTACCTAGGCAGTGCACAGCACGAAATAAGTGGCCCTTGCAGCTTC
CCCGTTTAACCCACTGTGCTATAGTTGCGGGTGGAACAGTCAACCTTTCTAGTAGTTTATGATATTGCCCTCTTTGTATTCCCATTTTCTACAGTTTTTTCCGC
AGACTTCTTTCTGCAAATTATTCAGCCTCCAAATGCAAATGAATGATATAAAAATAAGTAGGGAACATGGCAGAGAGTGGTGCTTCCCAGCCTCACAATGTG
GGAATTTGACATAGGATGAGAGTCAGAGTATAGGTTTAAAAGATAAAATCTTTAGTTAATAATTTTGTATTTATTTATTCTAGATGTATGTATCTGAGGAAAG
AAATCTGGTATTTTTGCTTTCCAATAAAGGGGATCAAAGTAATGGTTTTTCTCTCAGTTCTCTAAGCTGGTCTATGTTATAGCTCTAGCAGTATGGAAATGTG
CTTTAAAATATGCTTACCTTTTGAATGATCATGGCTATATGTTGTTGAGATATTTGAAACTTACCTTGTTTTCACTTGTGCACTGTGAATGAACTTTGTATTAT
TTTTTTAAAACCTTCACATTACGTGTAGATATTATTGCAACTTATATTTTGCCTGAGCTTGATCAAAGGTCTTTGTGTAGATGAGTAATTAAAAAATATTTAAA
TCACATTATAATTCTATTATTGGAGAGCATCTTTTAAATTTTTTTCTGTTTTAACGAGGGAAAGAGAAACCTGTATACCTAGGGTCATTATTTGACCCCATAGT
ATAACCAGATTCATGGTCTAACAAGCTCTCAGTGTGGCTTTTCTCTGAATGCTTGAATTTCACATGCCTTGCATTTCACAGTTGTACTCCATGGTCAACCGGT
GCTTTTTTTCACATCGTGGTACTTGTCAAAACATTTTGTTATTTTCCTTGGTAAAATATATAAAAAAGGTTTTCTAATTTCA
SEQ ID: 2490: OPA1 protein sequence (UniProt ID 060313)
MWRLRRAAVACEVCQSLVKHSSGIKGSLPLQKLHLVSRSIYHSHHPTLKLQRPQLRTSFQQFSSL
TNLPLRKLKFSPIKYGYQPRRNFWPARLATRLLKLRYLILGSAVGGGYTAKKTFDQWKDMIPDL
SEYKWIVPDIVWEIDEYIDFEKIRKALPSSEDLVKLAPDFDKIVESLSLLKDFFTSGSPEETAFRAT
DRGSESDKHFRKVSDKEKIDQLQEELLHTQLKYQRILERLEKENKELRKLVLQKDDKGIHHRKL
KKSLIDMYSEVLDVLSDYDASYNTQDHLPRVVVVGDQSAGKTSVLEMIAQARIFPRGSGEMMT
RSPVKVTLSEGPHHVALFKDSSREFDLTKEEDLAALRHEIELRMRKNVKEGCTVSPETISLNVKG
PGLQRMVLVDLPGVINTVTSGMAPDTKETIFSISKAYMQNPNAIILCIQDGSVDAERSIVTDLVSQ
MDPHGRRTIFVLTKVDLAEKNVASPSRIQQIIEGKLFPMKALGYFAVVTGKGNSSESIEAIREYEE
EFFQNSKLLKTSMLKAHQVTTRNLSLAVSDCFWKMVRESVEQQADSFKATRFNLETEWKNNY
PRLRELDRNELFEKAKNEILDEVISLSQVTPKHWEEILQQSLWERVSTHVIENIYLPAAQTMNSG
TFNTTVDIKLKQWTDKQLPNKAVEVAWETLQEEFSRFMTEPKGKEHDDIFDKLKEAVKEESIKR
HKWNDFAEDSLRVIQHNALEDRSISDKQQWDAAIYFMEEALQARLKDTENAIENMVGPDWKK
RWLYWKNRTQEQCVHNETKNELEKMLKCNEEHPAYLASDEITTVRKNLESRGVEVDPSLIKDT
WHQVYRRHFLKTALNHCNLCRRGFYYYQRHFVDSELECNDVVLFWRIQRMLAITANTLRQQL
TNTEVRRLEKNVKEVLEDFAEDGEKKIKLLTGKRVQLAEDLKKVREIQEKLDAFIEALHQEK

TABLE 6
PMO refinement to target intron 7
of an OPA1 transcript

| SEQ | | |
|---|---|---|
| ID | ASO Coordinates | Sequence 5′>3′ |
| 2491 | OPA1_H7xA(-134-105) | AAATACATATATAAAAAGGTCATTGTAAAA |
| 2492 | OPA1_H7xA(−133−104) | GAAATACATATATAAAAAGGTCATTGTAAA |
| 2493 | OPA1_H7xA(−132−108) | TACATATATAAAAAGGTCATTGTAA |
| 2494 | OPA1_H7xA(−132−103) | TGAAATACATATATAAAAAGGTCATTGTAA |
| 2495 | OPA1_H7xA(−131−102) | CTGAAATACATATATAAAAAGGTCATTGTA |
| 2496 | OPA1_H7xA(−127−98) | AATTCTGAAATACATATATAAAAAGGTCAT |
| 2497 | OPA1_H7xA(−126−97) | AAATTCTGAAATACATATATAAAAAGGTCA |
| 2498 | OPA1_H7xA(−126−102) | CTGAAATACATATATAAAAAGGTCA |
| 2499 | OPA1_H7xA(−125−96) | GAAATTCTGAAATACATATATAAAAAGGTC |

TABLE 7
PMO refinement to target the
5′UTR of an OPA1 transcript

| SEQ ID | ASO Coordinates | Sequence 5′>3′ |
|---|---|---|
| 2500 | hOPA1_H1A(-45-24) | CATGCGCACAG |
| | 2MM | TGCGTCGGAAT |
| 2501 | hOPA1_H1A(−2+21) | CCTTTCTAGGC |
| | 2MM | GTGCAGCACTA |
| 2502 | hOPA1_H1A(+64+3085) | CATGGACTTCT |
| | 2MM | |
| | | GCAAGAGCCTA |
| 2503 | hOPA1_H1A(+66+87) | CGCATGGACTT |
| | 2MM | CCGCAAGAGAT |

SEQ ID NO: 2504: CPP Sequence
RRSRTARAGRPGRNSSRPSAPRGASGGASG

1. A method of treating, preventing and/or delaying progression of glaucoma in a subject, the method comprising administering an antisense oligonucleotide that modulates mRNA productive transcript, stability and/or translation of OPA1 gene transcript or part thereof.

2. The method of claim 1, wherein the antisense oligonucleotide increases the level of OPA1 mRNA or the amount of functional OPA1 protein in a cell and/or a tissue of the subject.

3. The method of claim 2, wherein the amount of functional OPA1 protein in the cell and/or the tissue is increased by about 1.1 to about 10-fold.

4. The method of claim 2, wherein the tissue is selected from the group consisting of the retina, retinal pigment epithelium and combinations thereof.

5. The method of claim 1, wherein the antisense oligonucleotide binds to a targeted portion of:
(i) an OPA1 gene pre-mRNA in a cell to promote exclusion of a nonsense-mediated RNA decay-inducing (NMD) exon during splicing of the OPA1 pre-mRNA to increase the level of OPA1 mRNA transcripts encoding full length, functional OPA1;
(ii) the 5′ untranslated region (UTR) of an OPA1 gene transcript in a cell to increase translation efficiency of an OPA1 mRNA;
(iii) the 5′ UTR of an OPA1 gene transcript in a cell to increase transcript stability; and/or
(iv) the 3′ UTR of an OPA1 gene transcript in a cell to increase transcript stability.

6. The method of claim 5, wherein the antisense oligonucleotide binds to intron 7 of an OPA1 gene pre-mRNA in a cell and increases the level of OPA1 gene transcripts encoding full length, functional OPA1 by exclusion of NMD exon 7×.

7. The method of claim 1, wherein:
a) the antisense oligonucleotide binds within a targeted portion of the OPA1 pre-mRNA nucleotide sequence corresponding to SEQ ID NOs: 1, 55, 139, or
b) the antisense oligonucleotide binds within a targeted portion of the 5′ UTR of OPA1 mRNA, wherein the targeted portion is within the nucleotide sequence corresponding to SEQ ID NO: 55; or
c) the antisense oligonucleotide binds within a targeted portion of the 3′ UTR of OPA1 mRNA, wherein the targeted portion is within the nucleotide sequence corresponding to SEQ ID NO: 139.

8. (canceled)

9. (canceled)

10. (canceled)

11. The method of claim 10, wherein the antisense oligonucleotide comprises;
a) a backbone modification comprising a phosphorothioate linkage or a phosphorodiamidate linkage; and/or
b) a phosphorodiamidate morpholino, a locked nucleic acid, a peptide nucleic acid, a 2′-O-methyl, a 2′-Fluoro, or a 2′-O-methoxyethyl moiety; and/or
c) at least one modified sugar moiety; and/or
d) a 2′-O-methoxyethyl moiety.

12. (canceled)

13. (canceled)

14. The method of claim 11, wherein:
a) each sugar moiety in the antisense oligonucleotide is a modified sugar moiety; and/or
b) each nucleotide of the antisense oligonucleotide comprises a 2′-O-methoxyethyl moiety.

15. (canceled)

16. (canceled)

17. The method of claim 1, wherein the nucleotide sequence of the antisense oligonucleotide consists of 10 to 50 nucleotides, 15 to 40 nucleotides, 18 to 40 nucleotides, 17 to 25 nucleotides, 20 to 35 nucleotides, 20 to 30 nucleotides, 22 to 30 nucleotides, 22 to 28 nucleotides, 24 to 30 nucleotides, 25 to 30 nucleotides, or 26 to 30 nucleotides.

18. (canceled)

19. The method of claim 17, wherein the antisense oligonucleotide comprises one or more phosphorodiamidate morpholino moieties.

20. The method of claim 1, wherein the antisense oligonucleotide is linked to a functional moiety.

21. The method of claim 20, wherein the functional moiety;
a) comprises or consists of a delivery moiety or a stabilising moiety;
b) is covalently or non-covalently linked to the antisense oligonucleotide; and/or
c) is linked to the 5′ end of the antisense oligonucleotide or is linked to the 3′ end of the antisense oligonucleotide.

22. The method of claim 21, wherein the delivery moiety;
a) is selected from the group consisting of lipids, peptides, carbohydrates, and antibodies; and/or
b) comprises a cell-penetrating peptide (CPP) or a N-acetylgalactosamine (GalNAc) moiety.

23. (canceled)

24. (canceled)

25. (canceled)

26. The method of claim 1, wherein the nucleotide sequence of the antisense oligonucleotide;
a) is at least 60%, 65%, 70%, 75%, 80%, 85%, 90%, 95%, or 100% complementary to the nucleotide sequence of the targeted portion over the length of the antisense oligonucleotide; and/or
b) corresponds to any one of SEQ ID NOs: 2-54, 56-138, 140-2488 or 2491-2503.

27. (canceled)

28. The method of claim 1, wherein the antisense oligonucleotide is complexed with a delivery nanocarrier.

29. The method of claim 28, wherein the delivery nanocarrier;
a) is selected from the group consisting of: lipoplexes, liposomes, exosomes, inorganic nanoparticles, and DNA nanostructures; and/or
b) comprises a lipid nanoparticle (LNP) encapsulating the antisense oligonucleotide.

30. (canceled)

31. The method of claim 1, wherein the antisense oligonucleotide is formulated for a route of administration selected from the group consisting of intravitreal, suprachoroidal, subretinal, ciliary intramuscular, intravenous, intra-arterial, subcutaneous, and topical routes.

32. (canceled)

33. An antisense oligonucleotide that:
a) binds to a targeted portion of the intron 7× of an OPA1 gene transcript in a cell and increases the level of OPA1 gene transcripts encoding full length, functional OPA1 by exclusion of NMD exon 7×, wherein the antisense oligonucleotide comprises or consists of any one of SEQ ID NOs: 2-54 or SEQ ID NOs: 2491-2503; or
b) binds to a targeted portion of the 5′ UTR of an OPA1 gene transcript in a cell and increases transcript stability of an OPA1 mRNA, wherein the targeted portion is within the nucleotide sequence corresponding to SEQ ID NO: 55, wherein the antisense oligonucleotide comprises or consists of any one of SEQ ID NOs: 56-138; or
c) binds to a targeted portion of the 3′ UTR of an OPA1 gene transcript in a cell and increases transcript stability of an OPA1 mRNA, wherein the antisense oligonucleotide binds within a targeted portion of the 3′ UTR of OPA1 mRNA, wherein the targeted portion is within the nucleotide sequence corresponding to SEQ ID NO: 139, and wherein the antisense oligonucleotide comprises or consists of any one of SEQ ID NOs: 140-2488.

34. (canceled)

35. (canceled)

36. (canceled)

37. (canceled)

38. (canceled)

39. (canceled)

The application's sequence listing, which the Patent Office published only in electronic form, follows.

SEQUENCE LISTING (2504 sequences)

SEQ ID NO: 1 - DNA, 2414 bp, Homo sapiens
  source 1..2414: mol_type = genomic DNA
gtgatggatggtttaagggggctaccgatacattcacactaatcagccatttctgccaagatcatgtcacctcaatctgttcatggactccaaatacaagaaattaatttgacaaagtgaaaatataaaagatgcatcatataaatatgtaacttttctggagtgggtagtataggtaaagccaaaagaaacaaattcaagcagaggaattttggtttctgaaaattaggttgtctgtagggtccctgtatttatacttagaacaaaattaggaatttctgtttatgtggtccagttattgagtcaccctaagtttgtaggcatcttacctacctacttgctccccaagtttttatttctaaaatgaaaagcattgctgtagatgaccagtttacactaaagaataacatttatttatttgttttagctaaagtatatggacagggaacattcatattcttgtagaagaaaattattttgacttttgggcaaaagcatgtagttcttatacactttgacaaactcattgcgtacatttttcacattaatcaaagtcagcacaaataaattttcaccttggaccacggagggtttgaacactggaaatttgatataattctggttgctaaagaacaagttctaataaaagcttaagtgtataccaatatgtggctgttggtgcaatcagcaggtccgtaaaaatatgattttaatggttaggtaatcccacaacggagatcccaaagttcatgtttggaagagacttttgggtcaaagtgaaatcagtgtaatgaatttaaaattatactctgagatcttgaaatcagctaattatgttacatcttattagctcagaaaagttttgaagttatatacaaatgctagtcaggaaaaaagattcagtcatgtaattcttgtacattctactatttaaatcaaccaatattatagattatgatttagtgcagtaattctgctggctaaccttatctcatttggtggtggttagtacttcagagtactcaccatagtttcatttatgttttcagcatcacttcctggtttttctcaattccatggctgtggaatcaattcatatgtatatttagcttcggtgagcaaaaacatagctagaaaaagaaaagaagtgagtttcctacctggttaaattaaagtcgatgtgttaagccaaggaggacttcttttgaatggtactttaacaatccctgttctgtatactgtgaatatatcatttaaatagcctaataaattggatgcttaggctgagccacctatactttagttttgttatggaaagaagggagaggagcaagtatgttcttatatgttacttagaaataagaatgtagctgtagttacacattgttcttaagtttttttcgtaagacaacttgaaatgagtcccataggcctgctatttaacattctaagatatgacttaaggttaatgatgagcttttgaatctgacaattcaagagatatccataatgaatactgattcattttctacattgctgaaagctaatgttcattttaagcctactttagtagcctttatttgggcttagagatgttattcctctttctgatatttattgggttatctgtttaacccttttatatctccctttcccgatttgtaaattagagactggcaagactttttaccctgagtagagcaccaaacatggcttgtttctgcccacactgtagttaccttgaggggaagtaaatgggactttaaaagcaatttatgctcttttatagtgaaattatccctcttactatcccgaaagactgttaccttacaatatcctccactcctttccccctgtagttactatagagatgacttttcggttcttcactgccataatgatcaaaatcctaattcatgagatttttatcattccaggcatgtgaggtttacttgatgcataaaaccgcaagtactttttgttgttttttaattgttttttctctcttatcttcttgaaagtctaagtagatcatcatttttgatgtcttattagtagcaactaataaattttccctgtatcttctcagcaaaagaactcaagcagagacagaagattagaactaccattggtagttttgcttcctatggatatgttcacatacatagaaatttttacaatgacctttttatatatgtatttcagaatttcagaatggcctcaatgccttaataggaagaaatacttgaaatttttaaattagggcttggttttgtgaggagctagtaaaggtttttctctttcagctttagcttgtttctgcggaggattccgctctttctccatcagtttcatagccctggaattgtagaaaagctctggtttcaagaccattgatatccatttctgtcagg

SEQ ID NO: 2 - DNA, 24 bp, synthetic construct
  misc_feature 1..24: note = Oligonucleotide
  source 1..24: mol_type = other DNA
ctgaaatacatatataaaaaggtc

SEQ ID NO: 3 - DNA, 24 bp, synthetic construct
  misc_feature 1..24: note = Oligonucleotide
  source 1..24: mol_type = other DNA
ctgaaatacatatataagaaggtc

SEQ ID NO: 4 - DNA, 25 bp, synthetic construct
  misc_feature 1..25: note = Oligonucleotide
  source 1..25: mol_type = other DNA
ctgaaatacatatataagaaggtca

SEQ ID NO: 5 - DNA, 25 bp, synthetic construct
  misc_feature 1..25: note = Oligonucleotide
  source 1..25: mol_type = other DNA
tacatatataagaaggtcattgtaa

SEQ ID NO: 6 - DNA, 25 bp, synthetic construct
  misc_feature 1..25: note = Oligonucleotide
  source 1..25: mol_type = other DNA
aaaggtcattgtaagaatttctatg

SEQ ID NO: 7 - DNA, 25 bp, synthetic construct
  misc_feature 1..25: note = Oligonucleotide
  source 1..25: mol_type = other DNA
gtaaaaatttctatgtatgtgaaca

SEQ ID NO: 8 - DNA, 25 bp, synthetic construct
  misc_feature 1..25: note = Oligonucleotide
  source 1..25: mol_type = other DNA
tctatgtatgtgaacatatccatag

SEQ ID NO: 9 - DNA, 25 bp, synthetic construct
  misc_feature 1..25: note = Oligonucleotide
  source 1..25: mol_type = other DNA
aatcttctgtctctgcttgagttct

SEQ ID NO: 10 - DNA, 30 bp, synthetic construct
  misc_feature 1..30: note = Oligonucleotide
  source 1..30: mol_type = other DNA
tgaggccattctgaaattctgaaatacata

SEQ ID NO: 11 - DNA, 30 bp, synthetic construct
  misc_feature 1..30: note = Oligonucleotide
  source 1..30: mol_type = other DNA
tgaggccattctggaattctgaaatacata

SEQ ID NO: 12 - DNA, 30 bp, synthetic construct
  misc_feature 1..30: note = Oligonucleotide
  source 1..30: mol_type = other DNA
ttgaggccattctgaaattctgaaatacat

SEQ ID NO: 13 - DNA, 30 bp, synthetic construct
  misc_feature 1..30: note = Oligonucleotide
  source 1..30: mol_type = other DNA
attgaggccattctgaaattctgaaataca

SEQ ID NO: 14 - DNA, 30 bp, synthetic construct
  misc_feature 1..30: note = Oligonucleotide
  source 1..30: mol_type = other DNA
cattgaggccattctgaaattctgaaatac

SEQ ID NO: 15 - DNA, 30 bp, synthetic construct
  misc_feature 1..30: note = Oligonucleotide
  source 1..30: mol_type = other DNA
cattgaggccattctgaaattctggaatac

SEQ ID NO: 16 - DNA, 30 bp, synthetic construct
  misc_feature 1..30: note = Oligonucleotide
  source 1..30: mol_type = other DNA
gcattgaggccattctgaaattctgaaata

SEQ ID NO: 17 - DNA, 30 bp, synthetic construct
  misc_feature 1..30: note = Oligonucleotide
  source 1..30: mol_type = other DNA
ggcattgaggccattctgaaattctgaaat

SEQ ID NO: 18 - DNA, 30 bp, synthetic construct
  misc_feature 1..30: note = Oligonucleotide
  source 1..30: mol_type = other DNA
aggcattgaggccattctgaaattctgaaa

SEQ ID NO: 19 - DNA, 30 bp, synthetic construct
  misc_feature 1..30: note = Oligonucleotide
  source 1..30: mol_type = other DNA
aaggcattgaggccattctgaaattctgaa

SEQ ID NO: 20 - DNA, 30 bp, synthetic construct
  misc_feature 1..30: note = Oligonucleotide
  source 1..30: mol_type = other DNA
taaggcattgaggccattctgaaattctga

SEQ ID NO: 21 - DNA, 29 bp, synthetic construct
  misc_feature 1..29: note = Oligonucleotide
  source 1..29: mol_type = other DNA
taaggcattgaggccattctgaaattctg

SEQ ID NO: 22 - DNA, 28 bp, synthetic construct
  misc_feature 1..28: note = Oligonucleotide
  source 1..28: mol_type = other DNA
taaggcattgaggccattctgaaattct

SEQ ID NO: 23 - DNA, 27 bp, synthetic construct
  misc_feature 1..27: note = Oligonucleotide
  source 1..27: mol_type = other DNA
taaggcattgaggccattctgaaattc

SEQ ID NO: 24 - DNA, 26 bp, synthetic construct
  misc_feature 1..26: note = Oligonucleotide
  source 1..26: mol_type = other DNA
taaggcattgaggccattctgaaatt

SEQ ID NO: 25 - DNA, 25 bp, synthetic construct
  misc_feature 1..25: note = Oligonucleotide
  source 1..25: mol_type = other DNA
taaggcattgaggccattctggaat

SEQ ID NO: 26 - DNA, 30 bp, synthetic construct
  misc_feature 1..30: note = Oligonucleotide
  source 1..30: mol_type = other DNA
ttaaggcattgaggccattctgaaattctg

SEQ ID NO: 27 - DNA, 30 bp, synthetic construct
  misc_feature 1..30: note = Oligonucleotide
  source 1..30: mol_type = other DNA
attaaggcattgaggccattctgaaattct

SEQ ID NO: 28 - DNA, 30 bp, synthetic construct
  misc_feature 1..30: note = Oligonucleotide
  source 1..30: mol_type = other DNA
tattaaggcattgaggccattctgaaattc

SEQ ID NO: 29 - DNA, 30 bp, synthetic construct
  misc_feature 1..30: note = Oligonucleotide
  source 1..30: mol_type = other DNA
ctattaaggcattgaggccattctgaaatt

SEQ ID NO: 30 - DNA, 30 bp, synthetic construct
  misc_feature 1..30: note = Oligonucleotide
  source 1..30: mol_type = other DNA
cctattaaggcattgaggccattctgaaat

SEQ ID NO: 31 - DNA, 30 bp, synthetic construct
  misc_feature 1..30: note = Oligonucleotide
  source 1..30: mol_type = other DNA
tcctattaaggcattgaggccattctgaaa

SEQ ID NO: 32 - DNA, 17 bp, synthetic construct
  misc_feature 1..17: note = Oligonucleotide
  source 1..17: mol_type = other DNA
ctctgcttgagttcttt

SEQ ID NO: 33 - DNA, 17 bp, synthetic construct
  misc_feature 1..17: note = Oligonucleotide
  source 1..17: mol_type = other DNA
tgtctctgcttgagttc

SEQ ID NO: 34 - DNA, 17 bp, synthetic construct
  misc_feature 1..17: note = Oligonucleotide
  source 1..17: mol_type = other DNA
ttctgtctctgcttgag

SEQ ID NO: 35 - DNA, 17 bp, synthetic construct
  misc_feature 1..17: note = Oligonucleotide
  source 1..17: mol_type = other DNA
atcttctgtctctgctt

SEQ ID NO: 36 - DNA, 17 bp, synthetic construct
  misc_feature 1..17: note = Oligonucleotide
  source 1..17: mol_type = other DNA
ctaatcttctgtctctg

SEQ ID NO: 37 - DNA, 17 bp, synthetic construct
  misc_feature 1..17: note = Oligonucleotide
  source 1..17: mol_type = other DNA
tgaacatatccatagga

SEQ ID NO: 38 - DNA, 17 bp, synthetic construct
  misc_feature 1..17: note = Oligonucleotide
  source 1..17: mol_type = other DNA
atgtgaacatatccata

SEQ ID NO: 39 - DNA, 17 bp, synthetic construct
  misc_feature 1..17: note = Oligonucleotide
  source 1..17: mol_type = other DNA
tgtatgtgaacatatcc

SEQ ID NO: 40 - DNA, 17 bp, synthetic construct
  misc_feature 1..17: note = Oligonucleotide
  source 1..17: mol_type = other DNA
ctatgtatgtgaacata

SEQ ID NO: 41 - DNA, 17 bp, synthetic construct
  misc_feature 1..17: note = Oligonucleotide
  source 1..17: mol_type = other DNA
tttctatgtatgtgaac

SEQ ID NO: 42 - DNA, 17 bp, synthetic construct
  misc_feature 1..17: note = Oligonucleotide
  source 1..17: mol_type = other DNA
aaatttctatgtatgtg

SEQ ID NO: 43 - DNA, 17 bp, synthetic construct
  misc_feature 1..17: note = Oligonucleotide
  source 1..17: mol_type = other DNA
taaaaatttctatgtat

SEQ ID NO: 44 - DNA, 17 bp, synthetic construct
  misc_feature 1..17: note = Oligonucleotide
  source 1..17: mol_type = other DNA
ttgtaaaaatttctatg

SEQ ID NO: 45 - DNA, 17 bp, synthetic construct
  misc_feature 1..17: note = Oligonucleotide
  source 1..17: mol_type = other DNA
tcattgtaaaaatttct

SEQ ID NO: 46 - DNA, 17 bp, synthetic construct
  misc_feature 1..17: note = Oligonucleotide
  source 1..17: mol_type = other DNA
aggtcattgtaaaaatt

SEQ ID NO: 47 - DNA, 17 bp, synthetic construct
  misc_feature 1..17: note = Oligonucleotide
  source 1..17: mol_type = other DNA
aaaaggtcattgtaaaa

SEQ ID NO: 48 - DNA, 17 bp, synthetic construct
  misc_feature 1..17: note = Oligonucleotide
  source 1..17: mol_type = other DNA
ataaaaaggtcattgta

SEQ ID NO: 49 - DNA, 17 bp, synthetic construct
  misc_feature 1..17: note = Oligonucleotide
  source 1..17: mol_type = other DNA
tatataaaaaggtcatt

SEQ ID NO: 50 - DNA, 17 bp, synthetic construct
  misc_feature 1..17: note = Oligonucleotide
  source 1..17: mol_type = other DNA
acatatataaaaaggtc

SEQ ID NO: 51 - DNA, 17 bp, synthetic construct
  misc_feature 1..17: note = Oligonucleotide
  source 1..17: mol_type = other DNA
aatacatatataaaaag

SEQ ID NO: 52 - DNA, 17 bp, synthetic construct
  misc_feature 1..17: note = Oligonucleotide
  source 1..17: mol_type = other DNA
tgaaatacatatataaa

SEQ ID NO: 53 - DNA, 17 bp, synthetic construct
  misc_feature 1..17: note = Oligonucleotide
  source 1..17: mol_type = other DNA
ttctgaaatacatatat

SEQ ID NO: 54 - DNA, 17 bp, synthetic construct
  misc_feature 1..17: note = Oligonucleotide
  source 1..17: mol_type = other DNA
aaattctgaaatacata

SEQ ID NO: 55 - DNA, 284 bp, synthetic construct
  misc_feature 1..284: note = Oligonucleotide
  source 1..284: mol_type = other DNA
gtccgttcccgacgcactgtgcgcatgcgctggtcctccgcggaccgttcgtgctgcccgcctagaaagggtgaagtggttgtttccgtgacggactgagtacgggtgcctgtcaggctcttgcggaagtccatgcgccattgggagggcctcggccgcggctctgtgcccttgctgctgagggccacttcctgggtcattcctggaccgggagccgggctggggctcacacgggggctcccgcgtggccgtctcggcgcctgcgtgacctccccgccggcggg

SEQ ID NO: 56 - DNA, 23 bp, synthetic construct
  misc_feature 1..23: note = Oligonucleotide
  source 1..23: mol_type = other DNA
accagcgcatgcgcacagtgcgt

SEQ ID NO: 57 - DNA, 22 bp, synthetic construct
  misc_feature 1..22: note = Oligonucleotide
  source 1..22: mol_type = other DNA
aggaccagcgcatgcgcacagt

SEQ ID NO: 58 - DNA, 21 bp, synthetic construct
  misc_feature 1..21: note = Oligonucleotide
  source 1..21: mol_type = other DNA
gtccgctgaggaccagcgcat

SEQ ID NO: 59 - DNA, 21 bp, synthetic construct
  misc_feature 1..21: note = Oligonucleotide
  source 1..21: mol_type = other DNA
tttctaggcgggcagcacgaa

SEQ ID NO: 60 - DNA, 23 bp, synthetic construct
  misc_feature 1..23: note = Oligonucleotide
  source 1..23: mol_type = other DNA
caaccacttcaccctttctaggc

SEQ ID NO: 61 - DNA, 19 bp, synthetic construct
  misc_feature 1..19: note = Oligonucleotide
  source 1..19: mol_type = other DNA
aaccacttcaccctttcta

SEQ ID NO: 62 - DNA, 25 bp, synthetic construct
  misc_feature 1..25: note = Oligonucleotide
  source 1..25: mol_type = other DNA
acccgtactcagtccgtcacggaaa

SEQ ID NO: 63 - DNA, 22 bp, synthetic construct
  misc_feature 1..22: note = Oligonucleotide
  source 1..22: mol_type = other DNA
cgtactcagtccgtcacggaaa

SEQ ID NO: 64 - DNA, 25 bp, synthetic construct
  misc_feature 1..25: note = Oligonucleotide
  source 1..25: mol_type = other DNA
acttccgcaagagcctgacaggcac

SEQ ID NO: 65 - DNA, 20 bp, synthetic construct
  misc_feature 1..20: note = Oligonucleotide
  source 1..20: mol_type = other DNA
ggacttccgcaagagcctga

SEQ ID NO: 66 - DNA, 25 bp, synthetic construct
  misc_feature 1..25: note = Oligonucleotide
  source 1..25: mol_type = other DNA
caatggcgcatggacttccgcaaga

SEQ ID NO: 67 - DNA, 20 bp, synthetic construct
  misc_feature 1..20: note = Oligonucleotide
  source 1..20: mol_type = other DNA
ctcccaatggcgcatggact

SEQ ID NO: 68 - DNA, 19 bp, synthetic construct
  misc_feature 1..19: note = Oligonucleotide
  source 1..19: mol_type = other DNA
cccaggaagtggtcctcag

SEQ ID NO: 69 - DNA, 19 bp, synthetic construct
  misc_feature 1..19: note = Oligonucleotide
  source 1..19: mol_type = other DNA
ggctcccggtccaggaatg

SEQ ID NO: 70 - DNA, 19 bp, synthetic construct
  misc_feature 1..19: note = Oligonucleotide
  source 1..19: mol_type = other DNA
tcacgcaggtgctgagacg

SEQ ID NO: 71 - DNA, 22 bp, synthetic construct
  misc_feature 1..22: note = Oligonucleotide
  source 1..22: mol_type = other DNA
cgtggaggaccagtgcatgcgc

SEQ ID NO: 72 - DNA, 21 bp, synthetic construct
  misc_feature 1..21: note = Oligonucleotide
  source 1..21: mol_type = other DNA
aacggtccgcggaggaccagc

SEQ ID NO: 73 - DNA, 22 bp, synthetic construct
  misc_feature 1..22: note = Oligonucleotide
  source 1..22: mol_type = other DNA
gcacgaacggtccgcggaggac

SEQ ID NO: 74 - DNA, 22 bp, synthetic construct
  misc_feature 1..22: note = Oligonucleotide
  source 1..22: mol_type = other DNA
ggcagtacgaacggtctgcgga

SEQ ID NO: 75 - DNA, 22 bp, synthetic construct
  misc_feature 1..22: note = Oligonucleotide
  source 1..22: mol_type = other DNA
ggtgggcagcacgaatggtccg

SEQ ID NO: 76 - DNA, 22 bp, synthetic construct
  misc_feature 1..22: note = Oligonucleotide
  source 1..22: mol_type = other DNA
tctaggcgggcagcacgaacgg

SEQ ID NO: 77 - DNA, 22 bp, synthetic construct
  misc_feature 1..22: note = Oligonucleotide
  source 1..22: mol_type = other DNA
cctttctaggcgggcagcacga

SEQ ID NO: 78 - DNA, 22 bp, synthetic construct
  misc_feature 1..22: note = Oligonucleotide
  source 1..22: mol_type = other DNA
tcaccctttctaggcgggcagc

SEQ ID NO: 79 - DNA, 25 bp, synthetic construct
  misc_feature 1..25: note = Oligonucleotide
  source 1..25: mol_type = other DNA
aaccacttcaccctttctaggcggg

SEQ ID NO: 80 - DNA, 25 bp, synthetic construct
  misc_feature 1..25: note = Oligonucleotide
  source 1..25: mol_type = other DNA
gaaacaaccacttcaccctttctag

SEQ ID NO: 81 - DNA, 25 bp, synthetic construct
  misc_feature 1..25: note = Oligonucleotide
  source 1..25: mol_type = other DNA
tcacggaaacaaccacttcaccctt

SEQ ID NO: 82 - DNA, 25 bp, synthetic construct
  misc_feature 1..25: note = Oligonucleotide
  source 1..25: mol_type = other DNA
gtccgtcacggaaacaaccacttca

SEQ ID NO: 83 - DNA, 25 bp, synthetic construct
  misc_feature 1..25: note = Oligonucleotide
  source 1..25: mol_type = other DNA
actcagtccgtcacggaaacaacca

SEQ ID NO: 84 - DNA, 25 bp, synthetic construct
  misc_feature 1..25: note = Oligonucleotide
  source 1..25: mol_type = other DNA
caggcacccgtactcagtccgtcac

SEQ ID NO: 85 - DNA, 25 bp, synthetic construct
  misc_feature 1..25: note = Oligonucleotide
  source 1..25: mol_type = other DNA
cctgacaggcacccgtactcagtcc

SEQ ID NO: 86 - DNA, 23 bp, synthetic construct
  misc_feature 1..23: note = Oligonucleotide
  source 1..23: mol_type = other DNA
gagcctgacaggcacccgtactc

SEQ ID NO: 87 - DNA, 22 bp, synthetic construct
  misc_feature 1..22: note = Oligonucleotide
  source 1..22: mol_type = other DNA
gcaagagcctgacaggcacccg

SEQ ID NO: 88 - DNA, 22 bp, synthetic construct
  misc_feature 1..22: note = Oligonucleotide
  source 1..22: mol_type = other DNA
aagtggccctcagcagcaaggg

SEQ ID NO: 89 - DNA, 24 bp, synthetic construct
  misc_feature 1..24: note = Oligonucleotide
  source 1..24: mol_type = other DNA
acctaggaagtggtcctcagcagc

SEQ ID NO: 90 - DNA, 25 bp, synthetic construct
  misc_feature 1..25: note = Oligonucleotide
  source 1..25: mol_type = other DNA
ggaatgacccaggaagtggccctca

SEQ ID NO: 91 - DNA, 25 bp, synthetic construct
  misc_feature 1..25: note = Oligonucleotide
  source 1..25: mol_type = other DNA
gtccaggaatgacccaggaagtggc

SEQ ID NO: 92 - DNA, 25 bp, synthetic construct
  misc_feature 1..25: note = Oligonucleotide
  source 1..25: mol_type = other DNA
ctgacaggcacccgtactcagtccg

SEQ ID NO: 93 - DNA, 25 bp, synthetic construct
  misc_feature 1..25: note = Oligonucleotide
  source 1..25: mol_type = other DNA
gcctgacaggcacccgtactcagtc

SEQ ID NO: 94 - DNA, 25 bp, synthetic construct
  misc_feature 1..25: note = Oligonucleotide
  source 1..25: mol_type = other DNA
agcctgacaggcacccgtactcagt

SEQ ID NO: 95 - DNA, 25 bp, synthetic construct
  misc_feature 1..25: note = Oligonucleotide
  source 1..25: mol_type = other DNA
gagcctgacaggcacccgtactcag

SEQ ID NO: 96 - DNA, 25 bp, synthetic construct
  misc_feature 1..25: note = Oligonucleotide
  source 1..25: mol_type = other DNA
agagcctgacaggcacccgtactca

SEQ ID NO: 97 - DNA, 25 bp, synthetic construct
  misc_feature 1..25: note = Oligonucleotide
  source 1..25: mol_type = other DNA
aagagcctgacaggcacccgtactc

SEQ ID NO: 98 - DNA, 25 bp, synthetic construct
  misc_feature 1..25: note = Oligonucleotide
  source 1..25: mol_type = other DNA
caagagcctgacaggcacccgtact

SEQ ID NO: 99 - DNA, 25 bp, synthetic construct
  misc_feature 1..25: note = Oligonucleotide
  source 1..25: mol_type = other DNA
gcaagagcctgacaggcacccgtac

SEQ ID NO: 100 - DNA, 25 bp, synthetic construct
  misc_feature 1..25: note = Oligonucleotide
  source 1..25: mol_type = other DNA
ctgacaggcattcgtactcagtccg

SEQ ID NO: 101 - DNA, 25 bp, synthetic construct
  misc_feature 1..25: note = Oligonucleotide
  source 1..25: mol_type = other DNA
gcctgacaggcacttgtactcagtc

SEQ ID NO: 102 - DNA, 25 bp, synthetic construct
  misc_feature 1..25: note = Oligonucleotide
  source 1..25: mol_type = other DNA
agcctgacaggcattcgtactcagt

SEQ ID NO: 103 - DNA, 25 bp, synthetic construct
  misc_feature 1..25: note = Oligonucleotide
  source 1..25: mol_type = other DNA
gagcttgacaggcacctgtactcag

SEQ ID NO: 104 - DNA, 25 bp, synthetic construct
  misc_feature 1..25: note = Oligonucleotide
  source 1..25: mol_type = other DNA
agagcttgacaggcactcgtactca

SEQ ID NO: 105 - DNA, 25 bp, synthetic construct
  misc_feature 1..25: note = Oligonucleotide
  source 1..25: mol_type = other DNA
aagagcttgacaggcactcgtactc

SEQ ID NO: 106 - DNA, 25 bp, synthetic construct
  misc_feature 1..25: note = Oligonucleotide
  source 1..25: mol_type = other DNA
caagagcttgacaggcatccgtact

SEQ ID NO: 107 - DNA, 25 bp, synthetic construct
  misc_feature 1..25: note = Oligonucleotide
  source 1..25: mol_type = other DNA
gcaagagcttgacaggcatccgtac

SEQ ID NO: 108 - DNA, 25 bp, synthetic construct
  misc_feature 1..25: note = Oligonucleotide
  source 1..25: mol_type = other DNA
aacaaccacttcaccctttctaggc

SEQ ID NO: 109 - DNA, 24 bp, synthetic construct
  misc_feature 1..24: note = Oligonucleotide
  source 1..24: mol_type = other DNA
acaaccacttcaccctttctaggc

SEQ ID NO: 110 - DNA, 25 bp, synthetic construct
  misc_feature 1..25: note = Oligonucleotide
  source 1..25: mol_type = other DNA
acaaccacttcaccctttctaggcg

SEQ ID NO: 111 - DNA, 25 bp, synthetic construct
  misc_feature 1..25: note = Oligonucleotide
  source 1..25: mol_type = other DNA
aaacaaccacttcaccctttctagg

SEQ ID NO: 112 - DNA, 23 bp, synthetic construct
  misc_feature 1..23: note = Oligonucleotide
  source 1..23: mol_type = other DNA
caaccactttaccctttctaggc

SEQ ID NO: 113 - DNA, 23 bp, synthetic construct
  misc_feature 1..23: note = Oligonucleotide
  source 1..23: mol_type = other DNA
caaccacttcatcctttctaggc

SEQ ID NO: 114 - DNA, 18 bp, synthetic construct
  misc_feature 1..18: note = Oligonucleotide
  source 1..18: mol_type = other DNA
acttccgcaagagcctga

SEQ ID NO: 115 - DNA, 18 bp, synthetic construct
  misc_feature 1..18: note = Oligonucleotide
  source 1..18: mol_type = other DNA
tcccaatggcgcatggac

SEQ ID NO: 116 - DNA, 30 bp, synthetic construct
  misc_feature 1..30: note = Oligonucleotide
  source 1..30: mol_type = other DNA
gcgcatgcgcacagtgcgtcgggaacggac

SEQ ID NO: 117 - DNA, 30 bp, synthetic construct
  misc_feature 1..30: note = Oligonucleotide
  source 1..30: mol_type = other DNA
agcgcatgcgcacagtgcgtcgggaacgga

SEQ ID NO: 118 - DNA, 30 bp, synthetic construct
  misc_feature 1..30: note = Oligonucleotide
  source 1..30: mol_type = other DNA
cagcgcatgcgcacagtgcgtcgggaacgg

SEQ ID NO: 119 - DNA, 30 bp, synthetic construct
  misc_feature 1..30: note = Oligonucleotide
  source 1..30: mol_type = other DNA
ccagcgcatgcgcacagtgcgtcgggaacg

SEQ ID NO: 120 - DNA, 30 bp, synthetic construct
  misc_feature 1..30: note = Oligonucleotide
  source 1..30: mol_type = other DNA
accagcgcatgcgcacagtgcgtcgggaac

SEQ ID NO: 121 - DNA, 30 bp, synthetic construct
  misc_feature 1..30: note = Oligonucleotide
  source 1..30: mol_type = other DNA
gaccagcgcatgcgcacagtgcgtcgggaa

SEQ ID NO: 122 - DNA, 30 bp, synthetic construct
  misc_feature 1..30: note = Oligonucleotide
  source 1..30: mol_type = other DNA
ggaccagcgcatgcgcacagtgcgtcggga

SEQ ID NO: 123 - DNA, 30 bp, synthetic construct
  misc_feature 1..30: note = Oligonucleotide
  source 1..30: mol_type = other DNA
aggaccagcgcatgcgcacagtgcgtcggg

SEQ ID NO: 124 - DNA, 30 bp, synthetic construct
  misc_feature 1..30: note = Oligonucleotide
  source 1..30: mol_type = other DNA
gaggaccagcgcatgcgcacagtgcgtcgg

SEQ ID NO: 125 - DNA, 30 bp, synthetic construct
  misc_feature 1..30: note = Oligonucleotide
  source 1..30: mol_type = other DNA
ggaggaccagcgcatgcgcacagtgcgtcg

SEQ ID NO: 126 - DNA, 30 bp, synthetic construct
  misc_feature 1..30: note = Oligonucleotide
  source 1..30: mol_type = other DNA
cggaggaccagcgcatgcgcacagtgcgtc

SEQ ID NO: 127 - DNA, 30 bp, synthetic construct
  misc_feature 1..30: note = Oligonucleotide
  source 1..30: mol_type = other DNA
cactttaccctttctaggcgggcagcacga

SEQ ID NO: 128 - DNA, 30 bp, synthetic construct
  misc_feature 1..30: note = Oligonucleotide
  source 1..30: mol_type = other DNA
ccactttaccctttctaggcgggcagcacg

SEQ ID NO: 129 - DNA, 30 bp, synthetic construct
  misc_feature 1..30: note = Oligonucleotide
  source 1..30: mol_type = other DNA
accactttaccctttctaggcgggcagcac

SEQ ID NO: 130 - DNA, 30 bp, synthetic construct
  misc_feature 1..30: note = Oligonucleotide
  source 1..30: mol_type = other DNA
aaccactttaccctttctaggcgggcagca

SEQ ID NO: 131 - DNA, 30 bp, synthetic construct
  misc_feature 1..30: note = Oligonucleotide
  source 1..30: mol_type = other DNA
caaccactttaccctttctaggcgggcagc

SEQ ID NO: 132 - DNA, 29 bp, synthetic construct
  misc_feature 1..29: note = Oligonucleotide
  source 1..29: mol_type = other DNA
caaccactttaccctttctaggcgggcag

SEQ ID NO: 133 - DNA, 28 bp, synthetic construct
  misc_feature 1..28: note = Oligonucleotide
  source 1..28: mol_type = other DNA
caaccactttaccctttctaggcgggca

SEQ ID NO: 134 - DNA, 27 bp, synthetic construct
  misc_feature 1..27: note = Oligonucleotide
  source 1..27: mol_type = other DNA
caaccactttaccctttctaggcgggc

SEQ ID NO: 135 - DNA, 26 bp, synthetic construct
  misc_feature 1..26: note = Oligonucleotide
  source 1..26: mol_type = other DNA
caaccactttaccctttctaggcggg

SEQ ID NO: 136 - DNA, 25 bp, synthetic construct
  misc_feature 1..25: note = Oligonucleotide
  source 1..25: mol_type = other DNA
caaccactttaccctttctaggcgg

SEQ ID NO: 137 - DNA, 24 bp, synthetic construct
  misc_feature 1..24: note = Oligonucleotide
  source 1..24: mol_type = other DNA
caaccactttaccctttctaggcg

SEQ ID NO: 138 - DNA, 25 bp, synthetic construct
  misc_feature 1..25: note = Oligonucleotide
  source 1..25: mol_type = other DNA
aacaaccactttaccctttctaggc

SEQ ID NO: 139 - DNA, 3282 bp, synthetic construct
  misc_feature 1..3282: note = Oligonucleotide
  source 1..3282: mol_type = other DNA
gtccgttcccgacgcactgtgcgcatgcgctggtcctccgcggaccgttcgtgctgcccgcctagaaagggtgaagaatcgtactcataatcagctctgcatacatctgaagaacaaaaacatcaacgtcttttgtccagcctctttttcttctgctgttccacctttctaaacatacaataaagtcatgggataaaaataatcgatgtatgttacgggcgctttaaccatcagctgcctctcgaatggaagaacagtggtaatggattaacatcctattttgttgtactaaagtgacaaatcggaataatataattggtatggccattaggttcagtccttgaagataagaaacttgttctctgtttgttgtcttatttgtggtggcactcgtttaatggattaactgaggttgctcaatgttcagtttcttttccagaaatacaatgctaggtgttttgaaataaaacttatatagcaattgtttaaagttatcaattgtatataaaatcacagtagcctgctaaatcattgtatgtgtctgtagtattctattcccagaaactatttgaccatgataattcagtttatattcaccacatgaaagaaaaatgggtaacagaagaacccttaaaacaggttaatttggattgtaacgttcagtgaaagaaatttcaacccttcatagccagcgaagaaatttgccttggaagccaagtcagtaccagcttacctatttgattcagttgctgttttctcactctctatatccatttgaaattgatttattttagatgttgtatacttacgttaggctttctgttaatagtggtttttctcctgttgacagagccaccggattatgacacaggatgaggaagattaaggataatcaattgactaatttcatttagaatattatcaaacatttcaactaggtatcagaaaaaggctttctttcataagactattttaaatagaaattatttcaacaattaaagtaatgttgaccatccccctctcagctgaataaagaaaaatttagttcaatttattgcaatttaattacaatactaccttcacaacattttcatgtgttttaaataaatattttttaattggctaaaggacattcaagcaaagaaatgctttctttacttaaaatgtctatctcatttgctgccttttcactaagcctttactttgttaataaaagtgtccattgtgtgatgtttttgattttacagtttgctaaatcttattttcttggagttgctttttggtaacagccccattgctactccccattttattgttttacatcaatgcatgcttcgttgtgatccctcaagatgtaacacttggtatgctcggttgaggatatgaaaaaatacttccgaaaccaggaattcaatgtatgtttgttttatactgtttgataagaaaagtaggtccagccttaagcagcacagatgcgctggtagatgcatagtcaggaactttttttatttcttttaggtctagggacaggagtgaatagaaagggaggagagctctattatgttctatacacagattaggagatgaccttactgggtacacccctctaaccagtgcttacaggttaatgcatgttaatgaatatttttgcagttgtaaagcataacaattacaactacacatctatttctaaagaataaaacaggaccatatttatttacttctgtcaactatagaaagaaagaccttcagctgtatttccacagatttctcccaaggaaaaggctaatattagtcactactgttatcacatccctttgtataagttttaaaaagagatggagggagatcttcatttctttgaggagatcagtattgtaacgtatgtgaatagatgataacaattaatattactaaaagtcccacatgagagtcctgacgccctctccatgccccacagtaatgtggcttctttcatgggtttttttttcttctttttagctgatctcatcctaagcatgctttatttttccttgaaagctaggtatttatcaactgcagatgttattgaaagaaaataaaattcagtctcaagagtaaaccctgtgtcttgtgtctgtagttcaaaagtcagaaatgattctaatttaaacaaaaagatactaaatatacagaagttaaattcgaactagccacagaatcatttgtttttatgtcagaatttgcaaagagtggagtggacaaagctctgtatggaagactgaacaactgtaaatagatgatatccaaacttaatttggctaggacttcaattttaaaaatcagtgtacctaggcagtgcacagcacgaaataagtggcccttgcagcttccccgtttaacccactgtgctatagttgcgggtggaacagtcaacctttctagtagtttatgatattgccctctttgtattcccattttctacagttttttccgcagacttctttctgcaaattattcagcctccaaatgcaaatgaatgatataaaaataagtagggaacatggcagagagtggtgcttcccagcctcacaatgtgggaatttgacataggatgagagtcagagtataggtttaaaagataaaatctttagttaataattttgtatttatttattctagatgtatgtatctgaggaaagaaatctggtatttttgctttccaataaaggggatcaaagtaatggtttttctctcagttctctaagctggtctatgttatagctctagcagtatggaaatgtgctttaaaatatgcttaccttttgaatgatcatggctatatgttgttgagatatttgaaacttaccttgttttcacttgtgcactgtgaatgaactttgtattatttttttaaaaccttcacattacgtgtagatattattgcaacttatattttgcctgagcttgatcaaaggtcatttgtgtagatgagtaattaaaaaatatttaaatcacattataattctattattggagagcatcttttaaatttttttctgttttaacgagggaaagagaaacctgtatacctagggtcattatttgaccccatagtataaccagattcatggtctaacaagctctcagtgtggcttttctctgaatgcttgaatttcacatgccttgcatttcacagttgtactccatggtcaaccggtgctttttttcacatcgtggtacttgtcaaaacattttgttattttccttggtaaaatatataaaaaaggttttctaatttca

SEQ ID NO: 140 - DNA, 25 bp, synthetic construct
  misc_feature 1..25: note = Oligonucleotide
  source 1..25: mol_type = other DNA
agctgattatgagtacgattttaat

SEQ ID NO: 141 - DNA, 25 bp, synthetic construct
  misc_feature 1..25: note = Oligonucleotide
  source 1..25: mol_type = other DNA
cagagctgattatgagtacgatttt

SEQ ID NO: 142 - DNA, 25 bp, synthetic construct
  misc_feature 1..25: note = Oligonucleotide
  source 1..25: mol_type = other DNA
atgcagagctgattatgagtacgat

SEQ ID NO: 143 - DNA, 25 bp, synthetic construct
  misc_feature 1..25: note = Oligonucleotide
  source 1..25: mol_type = other DNA
tgtatgcagagctgattatgagtac

SEQ ID NO: 144 - DNA, 25 bp, synthetic construct
  misc_feature 1..25: note = Oligonucleotide
  source 1..25: mol_type = other DNA
agatgtatgcagagctgattatgag

SEQ ID NO: 145 - DNA, 25 bp, synthetic construct
  misc_feature 1..25: note = Oligonucleotide
  source 1..25: mol_type = other DNA
ttcagatgtatgcagagctgattat

SEQ ID NO: 146 - DNA, 25 bp, synthetic construct
  misc_feature 1..25: note = Oligonucleotide
  source 1..25: mol_type = other DNA
ttcttcagatgtatgcagagctgat

SEQ ID NO: 147 - DNA, 25 bp, synthetic construct
  misc_feature 1..25: note = Oligonucleotide
  source 1..25: mol_type = other DNA
ttgttcttcagatgtatgcagagct

SEQ ID NO: 148 - DNA, 25 bp, synthetic construct
  misc_feature 1..25: note = Oligonucleotide
  source 1..25: mol_type = other DNA
tttttgttcttcagatgtatgcaga

SEQ ID NO: 149 - DNA, 25 bp, synthetic construct
  misc_feature 1..25: note = Oligonucleotide
  source 1..25: mol_type = other DNA
atgtttttgttcttcagatgtatgc

SEQ ID NO: 150 - DNA, 25 bp, synthetic construct
  misc_feature 1..25: note = Oligonucleotide
  source 1..25: mol_type = other DNA
ttgatgtttttgttcttcagatgta

SEQ ID NO: 151 - DNA, 25 bp, synthetic construct
  misc_feature 1..25: note = Oligonucleotide
  source 1..25: mol_type = other DNA
acgttgatgtttttgttcttcagat

SEQ ID NO: 152 - DNA, 25 bp, synthetic construct
  misc_feature 1..25: note = Oligonucleotide
  source 1..25: mol_type = other DNA
aagacgttgatgtttttgttcttca

SEQ ID NO: 153 - DNA, 25 bp, synthetic construct
  misc_feature 1..25: note = Oligonucleotide
  source 1..25: mol_type = other DNA
caaaagacgttgatgtttttgttct

SEQ ID NO: 154 - DNA, 25 bp, synthetic construct
  misc_feature 1..25: note = Oligonucleotide
  source 1..25: mol_type = other DNA
ggacaaaagacgttgatgtttttgt

SEQ ID NO: 155 - DNA, 25 bp, synthetic construct
  misc_feature 1..25: note = Oligonucleotide
  source 1..25: mol_type = other DNA
gctggacaaaagacgttgatgtttt

SEQ ID NO: 156 - DNA, 25 bp, synthetic construct
  misc_feature 1..25: note = Oligonucleotide
  source 1..25: mol_type = other DNA
gaggctggacaaaagacgttgatgt

SEQ ID NO: 157 - DNA, 25 bp, synthetic construct
  misc_feature 1..25: note = Oligonucleotide
  source 1..25: mol_type = other DNA
aaagaggctggacaaaagacgttga

SEQ ID NO: 158 - DNA, 25 bp, synthetic construct
  misc_feature 1..25: note = Oligonucleotide
  source 1..25: mol_type = other DNA
gaaaaagaggctggacaaaagacgt

SEQ ID NO: 159 - DNA, 25 bp, synthetic construct
  misc_feature 1..25: note = Oligonucleotide
  source 1..25: mol_type = other DNA
gaagaaaaagaggctggacaaaaga

SEQ ID NO: 160 - DNA, 25 bp, synthetic construct
  misc_feature 1..25: note = Oligonucleotide
  source 1..25: mol_type = other DNA
gcagaagaaaaagaggctggacaaa

SEQ ID NO: 161 - DNA, 25 bp, synthetic construct
  misc_feature 1..25: note = Oligonucleotide
  source 1..25: mol_type = other DNA
acagcagaagaaaaagaggctggac

SEQ ID NO: 162 - DNA, 25 bp, synthetic construct
  misc_feature 1..25: note = Oligonucleotide
  source 1..25: mol_type = other DNA
ggaacagcagaagaaaaagaggctg

SEQ ID NO: 163 - DNA, 25 bp, synthetic construct
  misc_feature 1..25: note = Oligonucleotide
  source 1..25: mol_type = other DNA
ggtggaacagcagaagaaaaagagg

SEQ ID NO: 164 - DNA, 25 bp, synthetic construct
  misc_feature 1..25: note = Oligonucleotide
  source 1..25: mol_type = other DNA
aaaggtggaacagcagaagaaaaag

SEQ ID NO: 165 - DNA, 25 bp, synthetic construct
  misc_feature 1..25: note = Oligonucleotide
  source 1..25: mol_type = other DNA
tagaaaggtggaacagcagaagaaa

SEQ ID NO: 166 - DNA, 25 bp, synthetic construct
  misc_feature 1..25: note = Oligonucleotide
  source 1..25: mol_type = other DNA
gtttagaaaggtggaacagcagaag

SEQ ID NO: 167 - DNA, 25 bp, synthetic construct
  misc_feature 1..25: note = Oligonucleotide
  source 1..25: mol_type = other DNA
tatgtttagaaaggtggaacagcag

SEQ ID NO: 168 - DNA, 25 bp, synthetic construct
  misc_feature 1..25: note = Oligonucleotide
  source 1..25: mol_type = other DNA
ttgtatgtttagaaaggtggaacag

SEQ ID NO: 169 - DNA, 25 bp, synthetic construct
  misc_feature 1..25: note = Oligonucleotide
  source 1..25: mol_type = other DNA
ttattgtatgtttagaaaggtggaa

SEQ ID NO: 170 - DNA, 25 bp, synthetic construct
  misc_feature 1..25: note = Oligonucleotide
  source 1..25: mol_type = other DNA
actttattgtatgtttagaaaggtg

SEQ ID NO: 171 - DNA, 25 bp, synthetic construct
  misc_feature 1..25: note = Oligonucleotide
  source 1..25: mol_type = other DNA
atgactttattgtatgtttagaaag

SEQ ID NO: 172 - DNA, 25 bp, synthetic construct
  misc_feature 1..25: note = Oligonucleotide
  source 1..25: mol_type = other DNA
cccatgactttattgtatgtttaga

SEQ ID NO: 173 - DNA, 25 bp, synthetic construct
  misc_feature 1..25: note = Oligonucleotide
  source 1..25: mol_type = other DNA
tatcccatgactttattgtatgttt

SEQ ID NO: 174 - DNA, 25 bp, synthetic construct
  misc_feature 1..25: note = Oligonucleotide
  source 1..25: mol_type = other DNA
ttttatcccatgactttattgtatg

SEQ ID NO: 175 - DNA, 25 bp, synthetic construct
  misc_feature 1..25: note = Oligonucleotide
  source 1..25: mol_type = other DNA
tatttttatcccatgactttattgt

SEQ ID NO: 176 - DNA, 25 bp, synthetic construct
  misc_feature 1..25: note = Oligonucleotide
  source 1..25: mol_type = other DNA
gattatttttatcccatgactttat

SEQ ID NO: 177 - DNA, 25 bp, synthetic construct
  misc_feature 1..25: note = Oligonucleotide
  source 1..25: mol_type = other DNA
atcgattatttttatcccatgactt

SEQ ID NO: 178 - DNA, 25 bp, synthetic construct
  misc_feature 1..25: note = Oligonucleotide
  source 1..25: mol_type = other DNA
tacatcgattatttttatcccatga

SEQ ID NO: 179 - DNA, 25 bp, synthetic construct
  misc_feature 1..25: note = Oligonucleotide
  source 1..25: mol_type = other DNA
acatacatcgattatttttatccca

SEQ ID NO: 180 - DNA, 25 bp, synthetic construct
  misc_feature 1..25: note = Oligonucleotide
  source 1..25: mol_type = other DNA
gtaacatacatcgattatttttatc

SEQ ID NO: 181 - DNA, 25 bp, synthetic construct
  misc_feature 1..25: note = Oligonucleotide
  source 1..25: mol_type = other DNA
cccgtaacatacatcgattattttt

SEQ ID NO: 182 - DNA, 25 bp, synthetic construct
  misc_feature 1..25: note = Oligonucleotide
  source 1..25: mol_type = other DNA
gcgcccgtaacatacatcgattatt

SEQ ID NO: 183 - DNA, 25 bp, synthetic construct
  misc_feature 1..25: note = Oligonucleotide
  source 1..25: mol_type = other DNA
aaagcgcccgtaacatacatcgatt

SEQ ID NO: 184 - DNA, 25 bp, synthetic construct
  misc_feature 1..25: note = Oligonucleotide
  source 1..25: mol_type = other DNA
gttaaagcgcccgtaacatacatcg

SEQ ID NO: 185 - DNA, 25 bp, synthetic construct
  misc_feature 1..25: note = Oligonucleotide
  source 1..25: mol_type = other DNA
atggttaaagcgcccgtaacataca

SEQ ID NO: 186 - DNA, 25 bp, synthetic construct
  misc_feature 1..25: note = Oligonucleotide
  source 1..25: mol_type = other DNA
ctgatggttaaagcgcccgtaacat

SEQ ID NO: 187 - DNA, 25 bp, synthetic construct
  misc_feature 1..25: note = Oligonucleotide
  source 1..25: mol_type = other DNA
cagctgatggttaaagcgcccgtaa

SEQ ID NO: 188 - DNA, 25 bp, synthetic construct
  misc_feature 1..25: note = Oligonucleotide
  source 1..25: mol_type = other DNA
aggcagctgatggttaaagcgcccg

SEQ ID NO: 189 - DNA, 25 bp, synthetic construct
  misc_feature 1..25: note = Oligonucleotide
  source 1..25: mol_type = other DNA
gagaggcagctgatggttaaagcgc

SEQ ID NO: 190 - DNA, 25 bp, synthetic construct
  misc_feature 1..25: note = Oligonucleotide
  source 1..25: mol_type = other DNA
ttcgagaggcagctgatggttaaag

SEQ ID NO: 191 - DNA, 25 bp, synthetic construct
  misc_feature 1..25: note = Oligonucleotide
  source 1..25: mol_type = other DNA
ccattcgagaggcagctgatggtta

SEQ ID NO: 192 - DNA, 25 bp, synthetic construct
  misc_feature 1..25: note = Oligonucleotide
  source 1..25: mol_type = other DNA
cttccattcgagaggcagctgatgg

SEQ ID NO: 193 - DNA, 25 bp, synthetic construct
  misc_feature 1..25: note = Oligonucleotide
  source 1..25: mol_type = other DNA
gttcttccattcgagaggcagctga

SEQ ID NO: 194 - DNA, 25 bp, synthetic construct
  misc_feature 1..25: note = Oligonucleotide
  source 1..25: mol_type = other DNA
actgttcttccattcgagaggcagc

SEQ ID NO: 195 - DNA, 25 bp, synthetic construct
  misc_feature 1..25: note = Oligonucleotide
  source 1..25: mol_type = other DNA
accactgttcttccattcgagaggc

SEQ ID NO: 196 - DNA, 25 bp, synthetic construct
  misc_feature 1..25: note = Oligonucleotide
  source 1..25: mol_type = other DNA
attaccactgttcttccattcgaga

SEQ ID NO: 197 - DNA, 25 bp, synthetic construct
  misc_feature 1..25: note = Oligonucleotide
  source 1..25: mol_type = other DNA
tccattaccactgttcttccattcg

SEQ ID NO: 198 - DNA, 25 bp, synthetic construct
  misc_feature 1..25: note = Oligonucleotide
  source 1..25: mol_type = other DNA
taatccattaccactgttcttccat

SEQ ID NO: 199 - DNA, 25 bp, synthetic construct
  misc_feature 1..25: note = Oligonucleotide
  source 1..25: mol_type = other DNA
tgttaatccattaccactgttcttc

SEQ ID NO: 200 - DNA, 25 bp, synthetic construct
  misc_feature 1..25: note = Oligonucleotide
  source 1..25: mol_type = other DNA
ggatgttaatccattaccactgttc

SEQ ID NO: 201 - DNA, 25 bp, synthetic construct
  misc_feature 1..25: note = Oligonucleotide
  source 1..25: mol_type = other DNA
ataggatgttaatccattaccactg

SEQ ID NO: 202 - DNA, 25 bp, synthetic construct
  misc_feature 1..25: note = Oligonucleotide
  source 1..25: mol_type = other DNA
aaaataggatgttaatccattacca

SEQ ID NO: 203 - DNA, 25 bp, synthetic construct
  misc_feature 1..25: note = Oligonucleotide
  source 1..25: mol_type = other DNA
aacaaaataggatgttaatccatta

SEQ ID NO: 204 - DNA, 25 bp, synthetic construct
  misc_feature 1..25: note = Oligonucleotide
  source 1..25: mol_type = other DNA
tacaacaaaataggatgttaatcca

SEQ ID NO: 205 - DNA, 25 bp, synthetic construct
  misc_feature 1..25: note = Oligonucleotide
  source 1..25: mol_type = other DNA
tagtacaacaaaataggatgttaat

SEQ ID NO: 206 - DNA, 25 bp, synthetic construct
  misc_feature 1..25: note = Oligonucleotide
  source 1..25: mol_type = other DNA
ctttagtacaacaaaataggatgtt

SEQ ID NO: 207 - DNA, 25 bp, synthetic construct
  misc_feature 1..25: note = Oligonucleotide
  source 1..25: mol_type = other DNA
tcactttagtacaacaaaataggat

SEQ ID NO: 208 - DNA, 25 bp, synthetic construct
  misc_feature 1..25: note = Oligonucleotide
  source 1..25: mol_type = other DNA
ttgtcactttagtacaacaaaatag

SEQ ID NO: 209 - DNA, 25 bp, synthetic construct
  misc_feature 1..25: note = Oligonucleotide
  source 1..25: mol_type = other DNA
gatttgtcactttagtacaacaaaa

SEQ ID NO: 210 - DNA, 25 bp, synthetic construct
  misc_feature 1..25: note = Oligonucleotide
  source 1..25: mol_type = other DNA
tccgatttgtcactttagtacaaca

SEQ ID NO: 211 - DNA, 25 bp, synthetic construct
  misc_feature 1..25: note = Oligonucleotide
  source 1..25: mol_type = other DNA
tattccgatttgtcactttagtaca

SEQ ID NO: 212 - DNA, 25 bp, synthetic construct
  misc_feature 1..25: note = Oligonucleotide
  source 1..25: mol_type = other DNA
tattattccgatttgtcactttagt

SEQ ID NO: 213 - DNA, 25 bp, synthetic construct
  misc_feature 1..25: note = Oligonucleotide
  source 1..25: mol_type = other DNA
ttatattattccgatttgtcacttt

SEQ ID NO: 214 - DNA, 25 bp, synthetic construct
  misc_feature 1..25: note = Oligonucleotide
  source 1..25: mol_type = other DNA
caattatattattccgatttgtcac

SEQ ID NO: 215 - DNA, 25 bp, synthetic construct
  misc_feature 1..25: note = Oligonucleotide
  source 1..25: mol_type = other DNA
taccaattatattattccgatttgt

SEQ ID NO: 216 - DNA, 25 bp, synthetic construct
  misc_feature 1..25: note = Oligonucleotide
  source 1..25: mol_type = other DNA
ccataccaattatattattccgatt

SEQ ID NO: 217 - DNA, 25 bp, synthetic construct
  misc_feature 1..25: note = Oligonucleotide
  source 1..25: mol_type = other DNA
tggccataccaattatattattccg

SEQ ID NO: 218 - DNA, 25 bp, synthetic construct
  misc_feature 1..25: note = Oligonucleotide
  source 1..25: mol_type = other DNA
taatggccataccaattatattatt

SEQ ID NO: 219 - DNA, 25 bp, synthetic construct
  misc_feature 1..25: note = Oligonucleotide
  source 1..25: mol_type = other DNA
acctaatggccataccaattatatt

SEQ ID NO: 220 - DNA, 25 bp, synthetic construct
  misc_feature 1..25: note = Oligonucleotide
  source 1..25: mol_type = other DNA
tgaacctaatggccataccaattat

SEQ ID NO: 221 - DNA, 25 bp, synthetic construct
  misc_feature 1..25: note = Oligonucleotide
  source 1..25: mol_type = other DNA
gactgaacctaatggccataccaat

SEQ ID NO: 222 - DNA, 25 bp, synthetic construct
  misc_feature 1..25: note = Oligonucleotide
  source 1..25: mol_type = other DNA
aaggactgaacctaatggccatacc

SEQ ID NO: 223 - DNA, 25 bp, synthetic construct
  misc_feature 1..25: note = Oligonucleotide
  source 1..25: mol_type = other DNA
ttcaaggactgaacctaatggccat

SEQ ID NO: 224 - DNA, 25 bp, synthetic construct
  misc_feature 1..25: note = Oligonucleotide
  source 1..25: mol_type = other DNA
atcttcaaggactgaacctaatggc

SEQ ID NO: 225 - DNA, 25 bp, synthetic construct
  misc_feature 1..25: note = Oligonucleotide
  source 1..25: mol_type = other DNA
cttatcttcaaggactgaacctaat

SEQ ID NO: 226 - DNA, 25 bp, synthetic construct
  misc_feature 1..25: note = Oligonucleotide
  source 1..25: mol_type = other DNA
tttcttatcttcaaggactgaacct

SEQ ID NO: 227 - DNA, 25 bp, synthetic construct
  misc_feature 1..25: note = Oligonucleotide
  source 1..25: mol_type = other DNA
aagtttcttatcttcaaggactgaa

SEQ ID NO: 228 - DNA, 25 bp, synthetic construct
  misc_feature 1..25: note = Oligonucleotide
  source 1..25: mol_type = other DNA
aacaagtttcttatcttcaaggact

SEQ ID NO: 229 - DNA, 25 bp, synthetic construct
  misc_feature 1..25: note = Oligonucleotide
  source 1..25: mol_type = other DNA
gagaacaagtttcttatcttcaagg

SEQ ID NO: 230 - DNA, 25 bp, synthetic construct
  misc_feature 1..25: note = Oligonucleotide
  source 1..25: mol_type = other DNA
acagagaacaagtttcttatcttca

SEQ ID NO: 231 - DNA, 25 bp, synthetic construct
  misc_feature 1..25: note = Oligonucleotide
  source 1..25: mol_type = other DNA
caaacagagaacaagtttcttatct

SEQ ID NO: 232 - DNA, 25 bp, synthetic construct
  misc_feature 1..25: note = Oligonucleotide
  source 1..25: mol_type = other DNA
caacaaacagagaacaagtttctta

SEQ ID NO: 233 - DNA, 25 bp, synthetic construct
  misc_feature 1..25: note = Oligonucleotide
  source 1..25: mol_type = other DNA
agacaacaaacagagaacaagtttc

SEQ ID NO: 234 - DNA, 25 bp, synthetic construct
  misc_feature 1..25: note = Oligonucleotide
  source 1..25: mol_type = other DNA
ataagacaacaaacagagaacaagt

SEQ ID NO: 235 - DNA, 25 bp, synthetic construct
  misc_feature 1..25: note = Oligonucleotide
  source 1..25: mol_type = other DNA
caaataagacaacaaacagagaaca

SEQ ID NO: 236 - DNA, 25 bp, synthetic construct
  misc_feature 1..25: note = Oligonucleotide
  source 1..25: mol_type = other DNA
ccacaaataagacaacaaacagaga

SEQ ID NO: 237 - DNA, 25 bp, synthetic construct
  misc_feature 1..25: note = Oligonucleotide
  source 1..25: mol_type = other DNA
ccaccacaaataagacaacaaacag

SEQ ID NO: 238 - DNA, 25 bp, synthetic construct
  misc_feature 1..25: note = Oligonucleotide
  source 1..25: mol_type = other DNA
gtgccaccacaaataagacaacaaa

SEQ ID NO: 239 - DNA, 25 bp, synthetic construct
  misc_feature 1..25: note = Oligonucleotide
  source 1..25: mol_type = other DNA
cgagtgccaccacaaataagacaac

SEQ ID NO: 240 - DNA, 25 bp, synthetic construct
  misc_feature 1..25: note = Oligonucleotide
  source 1..25: mol_type = other DNA
aaacgagtgccaccacaaataagac

SEQ ID NO: 241 - DNA, 25 bp, synthetic construct
  misc_feature 1..25: note = Oligonucleotide
  source 1..25: mol_type = other DNA
attaaacgagtgccaccacaaataa

SEQ ID NO: 242 - DNA, 25 bp, synthetic construct
  misc_feature 1..25: note = Oligonucleotide
  source 1..25: mol_type = other DNA
tccattaaacgagtgccaccacaaa

SEQ ID NO: 243 - DNA, 25 bp, synthetic construct
  misc_feature 1..25: note = Oligonucleotide
  source 1..25: mol_type = other DNA
taatccattaaacgagtgccaccac

SEQ ID NO: 244 - DNA, 25 bp, synthetic construct
  misc_feature 1..25: note = Oligonucleotide
  source 1..25: mol_type = other DNA
agttaatccattaaacgagtgccac

SEQ ID NO: 245 - DNA, 25 bp, synthetic construct
  misc_feature 1..25: note = Oligonucleotide
  source 1..25: mol_type = other DNA
ctcagttaatccattaaacgagtgc

SEQ ID NO: 246 - DNA, 25 bp, synthetic construct
  misc_feature 1..25: note = Oligonucleotide
  source 1..25: mol_type = other DNA
aacctcagttaatccattaaacgag

SEQ ID NO: 247 - DNA, 25 bp, synthetic construct
  misc_feature 1..25: note = Oligonucleotide
  source 1..25: mol_type = other DNA
agcaacctcagttaatccattaaac

SEQ ID NO: 248 - DNA, 25 bp, synthetic construct
  misc_feature 1..25: note = Oligonucleotide
  source 1..25: mol_type = other DNA
ttgagcaacctcagttaatccatta

SEQ ID NO: 249 - DNA, 25 bp, synthetic construct
  misc_feature 1..25: note = Oligonucleotide
  source 1..25: mol_type = other DNA
acattgagcaacctcagttaatcca

SEQ ID NO: 250 - DNA, 25 bp, synthetic construct
  misc_feature 1..25: note = Oligonucleotide
  source 1..25: mol_type = other DNA
tgaacattgagcaacctcagttaat

SEQ ID NO: 251 - DNA, 25 bp, synthetic construct
  misc_feature 1..25: note = Oligonucleotide
  source 1..25: mol_type = other DNA
aactgaacattgagcaacctcagtt

SEQ ID NO: 252 - DNA, 25 bp, synthetic construct
  misc_feature 1..25: note = Oligonucleotide
  source 1..25: mol_type = other DNA
agaaactgaacattgagcaacctca

SEQ ID NO: 253 - DNA, 25 bp, synthetic construct
  misc_feature 1..25: note = Oligonucleotide
  source 1..25: mol_type = other DNA
aaaagaaactgaacattgagcaacc

SEQ ID NO: 254 - DNA, 25 bp, synthetic construct
  misc_feature 1..25: note = Oligonucleotide
  source 1..25: mol_type = other DNA
tggaaaagaaactgaacattgagca

SEQ ID NO: 255 - DNA, 25 bp, synthetic construct
  misc_feature 1..25: note = Oligonucleotide
  source 1..25: mol_type = other DNA
ttctggaaaagaaactgaacattga

SEQ ID NO: 256 - DNA, 25 bp, synthetic construct
  misc_feature 1..25: note = Oligonucleotide
  source 1..25: mol_type = other DNA
tatttctggaaaagaaactgaacat

SEQ ID NO: 257 - DNA, 25 bp, synthetic construct
  misc_feature 1..25: note = Oligonucleotide
  source 1..25: mol_type = other DNA
ttgtatttctggaaaagaaactgaa

SEQ ID NO: 258 - DNA, 25 bp, synthetic construct
  misc_feature 1..25: note = Oligonucleotide
  source 1..25: mol_type = other DNA
gcattgtatttctggaaaagaaact

SEQ ID NO: 259 - DNA, 25 bp, synthetic construct
  misc_feature 1..25: note = Oligonucleotide
  source 1..25: mol_type = other DNA
ctagcattgtatttctggaaaagaa

SEQ ID NO: 260 - DNA, 25 bp, synthetic construct
  misc_feature 1..25: note = Oligonucleotide
  source 1..25: mol_type = other DNA
cacctagcattgtatttctggaaaa

SEQ ID NO: 261 - DNA, 25 bp, synthetic construct
  misc_feature 1..25: note = Oligonucleotide
  source 1..25: mol_type = other DNA
aaacacctagcattgtatttctgga

SEQ ID NO: 262 - DNA, 25 bp, synthetic construct
  misc_feature 1..25: note = Oligonucleotide
  source 1..25: mol_type = other DNA
tcaaaacacctagcattgtatttct

SEQ ID NO: 263 - DNA, 25 bp, synthetic construct
  misc_feature 1..25: note = Oligonucleotide
  source 1..25: mol_type = other DNA
atttcaaaacacctagcattgtatt

SEQ ID NO: 264 - DNA, 25 bp, synthetic construct
  misc_feature 1..25: note = Oligonucleotide
  source 1..25: mol_type = other DNA
tttatttcaaaacacctagcattgt

SEQ ID NO: 265 - DNA, 25 bp, synthetic construct
  misc_feature 1..25: note = Oligonucleotide
  source 1..25: mol_type = other DNA
agttttatttcaaaacacctagcat

SEQ ID NO: 266 - DNA, 25 bp, synthetic construct
  misc_feature 1..25: note = Oligonucleotide
  source 1..25: mol_type = other DNA
ataagttttatttcaaaacacctag

SEQ ID NO: 267 - DNA, 25 bp, synthetic construct
  misc_feature 1..25: note = Oligonucleotide
  source 1..25: mol_type = other DNA
tatataagttttatttcaaaacacc

SEQ ID NO: 268 - DNA, 25 bp, synthetic construct
  misc_feature 1..25: note = Oligonucleotide
  source 1..25: mol_type = other DNA
tgctatataagttttatttcaaaac

SEQ ID NO: 269 - DNA, 25 bp, synthetic construct
  misc_feature 1..25: note = Oligonucleotide
  source 1..25: mol_type = other DNA
aattgctatataagttttatttcaa

SEQ ID NO: 270 - DNA, 25 bp, synthetic construct
  misc_feature 1..25: note = Oligonucleotide
  source 1..25: mol_type = other DNA
aacaattgctatataagttttattt

SEQ ID NO: 271 - DNA, 25 bp, synthetic construct
  misc_feature 1..25: note = Oligonucleotide
  source 1..25: mol_type = other DNA
ttaaacaattgctatataagtttta

SEQ ID NO: 272 - DNA, 25 bp, synthetic construct
  misc_feature 1..25: note = Oligonucleotide
  source 1..25: mol_type = other DNA
actttaaacaattgctatataagtt

SEQ ID NO: 273 - DNA, 25 bp, synthetic construct
  misc_feature 1..25: note = Oligonucleotide
  source 1..25: mol_type = other DNA
ataactttaaacaattgctatataa

SEQ ID NO: 274 - DNA, 25 bp, synthetic construct
  misc_feature 1..25: note = Oligonucleotide
  source 1..25: mol_type = other DNA
ttgataactttaaacaattgctata

SEQ ID NO: 275 - DNA, 25 bp, synthetic construct
  misc_feature 1..25: note = Oligonucleotide
  source 1..25: mol_type = other DNA
caattgataactttaaacaattgct

SEQ ID NO: 276 - DNA, 25 bp, synthetic construct
  misc_feature 1..25: note = Oligonucleotide
  source 1..25: mol_type = other DNA
atacaattgataactttaaacaatt

SEQ ID NO: 277 - DNA, 25 bp, synthetic construct
  misc_feature 1..25: note = Oligonucleotide
  source 1..25: mol_type = other DNA
tatatacaattgataactttaaaca

SEQ ID NO: 278 - DNA, 25 bp, synthetic construct
  misc_feature 1..25: note = Oligonucleotide
  source 1..25: mol_type = other DNA
ttttatatacaattgataactttaa

SEQ ID NO: 279 - DNA, 25 bp, synthetic construct
  misc_feature 1..25: note = Oligonucleotide
  source 1..25: mol_type = other DNA
tgattttatatacaattgataactt

SEQ ID NO: 280 - DNA, 25 bp, synthetic construct
  misc_feature 1..25: note = Oligonucleotide
  source 1..25: mol_type = other DNA
ctgtgattttatatacaattgataa

SEQ ID NO: 281 - DNA, 25 bp, synthetic construct
  misc_feature 1..25: note = Oligonucleotide
  source 1..25: mol_type = other DNA
ctactgtgattttatatacaattga

SEQ ID NO: 282 - DNA, 25 bp, synthetic construct
  misc_feature 1..25: note = Oligonucleotide
  source 1..25: mol_type = other DNA
aggctactgtgattttatatacaat

SEQ ID NO: 283 - DNA, 25 bp, synthetic construct
  misc_feature 1..25: note = Oligonucleotide
  source 1..25: mol_type = other DNA
agcaggctactgtgattttatatac

SEQ ID NO: 284 - DNA, 25 bp, synthetic construct
  misc_feature 1..25: note = Oligonucleotide
  source 1..25: mol_type = other DNA
tttagcaggctactgtgattttata

SEQ ID NO: 285 - DNA, 25 bp, synthetic construct
  misc_feature 1..25: note = Oligonucleotide
  source 1..25: mol_type = other DNA
tgatttagcaggctactgtgatttt

SEQ ID NO: 286 - DNA, 25 bp, synthetic construct
  misc_feature 1..25: note = Oligonucleotide
  source 1..25: mol_type = other DNA
caatgatttagcaggctactgtgat

SEQ ID NO: 287 - DNA, 25 bp, synthetic construct
  misc_feature 1..25: note = Oligonucleotide
  source 1..25: mol_type = other DNA
atacaatgatttagcaggctactgt

SEQ ID NO: 288 - DNA, 25 bp, synthetic construct
  misc_feature 1..25: note = Oligonucleotide
  source 1..25: mol_type = other DNA
cacatacaatgatttagcaggctac

SEQ ID NO: 289 - DNA, 25 bp, synthetic construct
  misc_feature 1..25: note = Oligonucleotide
  source 1..25: mol_type = other DNA
agacacatacaatgatttagcaggc

SEQ ID NO: 290 - DNA, 25 bp, synthetic construct
  misc_feature 1..25: note = Oligonucleotide
  source 1..25: mol_type = other DNA
tacagacacatacaatgatttagca

SEQ ID NO: 291 - DNA, 25 bp, synthetic construct
  misc_feature 1..25: note = Oligonucleotide
  source 1..25: mol_type = other DNA
tactacagacacatacaatgattta

SEQ ID NO: 292 - DNA, 25 bp, synthetic construct
  misc_feature 1..25: note = Oligonucleotide
  source 1..25: mol_type = other DNA
gaatactacagacacatacaatgat

SEQ ID NO: 293 - DNA, 25 bp, synthetic construct
  misc_feature 1..25: note = Oligonucleotide
  source 1..25: mol_type = other DNA
atagaatactacagacacatacaat

SEQ ID NO: 294 - DNA, 25 bp, synthetic construct
  misc_feature 1..25: note = Oligonucleotide
  source 1..25: mol_type = other DNA
ggaatagaatactacagacacatac

SEQ ID NO: 295 - DNA, 25 bp, synthetic construct
  misc_feature 1..25: note = Oligonucleotide
  source 1..25: mol_type = other DNA
ctgggaatagaatactacagacaca

SEQ ID NO: 296 - DNA, 25 bp, synthetic construct
  misc_feature 1..25: note = Oligonucleotide
  source 1..25: mol_type = other DNA
tttctgggaatagaatactacagac

SEQ ID NO: 297 - DNA, 25 bp, synthetic construct
  misc_feature 1..25: note = Oligonucleotide
  source 1..25: mol_type = other DNA
tagtttctgggaatagaatactaca

SEQ ID NO: 298 - DNA, 25 bp, synthetic construct
  misc_feature 1..25: note = Oligonucleotide
  source 1..25: mol_type = other DNA
aaatagtttctgggaatagaatact

SEQ ID NO: 299 - DNA, 25 bp, synthetic construct
  misc_feature 1..25: note = Oligonucleotide
  source 1..25: mol_type = other DNA
gtcaaatagtttctgggaatagaat

SEQ ID NO: 300 - DNA, 25 bp, synthetic construct
  misc_feature 1..25: note = Oligonucleotide
  source 1..25: mol_type = other DNA
atggtcaaatagtttctgggaatag

SEQ ID NO: 301 - DNA, 25 bp, synthetic construct
  misc_feature 1..25: note = Oligonucleotide
  source 1..25: mol_type = other DNA
atcatggtcaaatagtttctgggaa

SEQ ID NO: 302 - DNA, 25 bp, synthetic construct
  misc_feature 1..25: note = Oligonucleotide
  source 1..25: mol_type = other DNA
attatcatggtcaaatagtttctgg

SEQ ID NO: 303 - DNA, 25 bp, synthetic construct
  misc_feature 1..25: note = Oligonucleotide
  source 1..25: mol_type = other DNA
tgaattatcatggtcaaatagtttc

SEQ ID NO: 304 - DNA, 25 bp, synthetic construct
  misc_feature 1..25: note = Oligonucleotide
  source 1..25: mol_type = other DNA
aactgaattatcatggtcaaatagt

SEQ ID NO: 305 - DNA, 25 bp, synthetic construct
  misc_feature 1..25: note = Oligonucleotide
  source 1..25: mol_type = other DNA
ataaactgaattatcatggtcaaat

SEQ ID NO: 306 - DNA, 25 bp, synthetic construct
  misc_feature 1..25: note = Oligonucleotide
  source 1..25: mol_type = other DNA
aatataaactgaattatcatggtca

SEQ ID NO: 307 - DNA, 25 bp, synthetic construct
  misc_feature 1..25: note = Oligonucleotide
  source 1..25: mol_type = other DNA
gtgaatataaactgaattatcatgg

SEQ ID NO: 308 - DNA, 25 bp, synthetic construct
  misc_feature 1..25: note = Oligonucleotide
  source 1..25: mol_type = other DNA
gtggtgaatataaactgaattatca

SEQ ID NO: 309 - DNA, 25 bp, synthetic construct
  misc_feature 1..25: note = Oligonucleotide
  source 1..25: mol_type = other DNA
catgtggtgaatataaactgaatta

SEQ ID NO: 310 - DNA, 25 bp, synthetic construct
  misc_feature 1..25: note = Oligonucleotide
  source 1..25: mol_type = other DNA
tttcatgtggtgaatataaactgaa

SEQ ID NO: 311 - DNA, 25 bp, synthetic construct
  misc_feature 1..25: note = Oligonucleotide
  source 1..25: mol_type = other DNA
ttctttcatgtggtgaatataaact

SEQ ID NO: 312 - DNA, 25 bp, synthetic construct
  misc_feature 1..25: note = Oligonucleotide
  source 1..25: mol_type = other DNA
tttttctttcatgtggtgaatataa

SEQ ID NO: 313 - DNA, 25 bp, synthetic construct
  misc_feature 1..25: note = Oligonucleotide
  source 1..25: mol_type = other DNA
ccatttttctttcatgtggtgaata

SEQ ID NO: 314 - DNA, 25 bp, synthetic construct
  misc_feature 1..25: note = Oligonucleotide
  source 1..25: mol_type = other DNA
tacccatttttctttcatgtggtga

SEQ ID NO: 315 - DNA, 25 bp, synthetic construct
  misc_feature 1..25: note = Oligonucleotide
  source 1..25: mol_type = other DNA
tgttacccatttttctttcatgtgg

SEQ ID NO: 316 - DNA, 25 bp, synthetic construct
  misc_feature 1..25: note = Oligonucleotide
  source 1..25: mol_type = other DNA
ttctgttacccatttttctttcatg

SEQ ID NO: 317 - DNA, 25 bp, synthetic construct
  misc_feature 1..25: note = Oligonucleotide
  source 1..25: mol_type = other DNA
ttcttctgttacccatttttctttc

SEQ ID NO: 318 - DNA, 25 bp, synthetic construct
  misc_feature 1..25: note = Oligonucleotide
  source 1..25: mol_type = other DNA
gggttcttctgttacccatttttct

SEQ ID NO: 319 - DNA, 25 bp, synthetic construct
  misc_feature 1..25: note = Oligonucleotide
  source 1..25: mol_type = other DNA
taagggttcttctgttacccatttt

SEQ ID NO: 320 - DNA, 25 bp, synthetic construct
  misc_feature 1..25: note = Oligonucleotide
  source 1..25: mol_type = other DNA
ttttaagggttcttctgttacccat

SEQ ID NO: 321 - DNA, 25 bp, synthetic construct
  misc_feature 1..25: note = Oligonucleotide
  source 1..25: mol_type = other DNA
ctgttttaagggttcttctgttacc

SEQ ID NO: 322 - DNA, 25 bp, synthetic construct
  misc_feature 1..25: note = Oligonucleotide
  source 1..25: mol_type = other DNA
aacctgttttaagggttcttctgtt

SEQ ID NO: 323 - DNA, 25 bp, synthetic construct
  misc_feature 1..25: note = Oligonucleotide
  source 1..25: mol_type = other DNA
attaacctgttttaagggttcttct

SEQ ID NO: 324 - DNA, 25 bp, synthetic construct
  misc_feature 1..25: note = Oligonucleotide
  source 1..25: mol_type = other DNA
caaattaacctgttttaagggttct

SEQ ID NO: 325 - DNA, 25 bp, synthetic construct
  misc_feature 1..25: note = Oligonucleotide
  source 1..25: mol_type = other DNA
atccaaattaacctgttttaagggt

SEQ ID NO: 326 - DNA, 25 bp, synthetic construct
  misc_feature 1..25: note = Oligonucleotide
  source 1..25: mol_type = other DNA
acaatccaaattaacctgttttaag

SEQ ID NO: 327 - DNA, 25 bp, synthetic construct
  misc_feature 1..25: note = Oligonucleotide
  source 1..25: mol_type = other DNA
gttacaatccaaattaacctgtttt

SEQ ID NO: 328 - DNA, 25 bp, synthetic construct
  misc_feature 1..25: note = Oligonucleotide
  source 1..25: mol_type = other DNA
aacgttacaatccaaattaacctgt

SEQ ID NO: 329 - DNA, 25 bp, synthetic construct
  misc_feature 1..25: note = Oligonucleotide
  source 1..25: mol_type = other DNA
ctgaacgttacaatccaaattaacc

SEQ ID NO: 330 - DNA, 25 bp, synthetic construct
  misc_feature 1..25: note = Oligonucleotide
  source 1..25: mol_type = other DNA
tcactgaacgttacaatccaaatta

SEQ ID NO: 331 - DNA, 25 bp, synthetic construct
  misc_feature 1..25: note = Oligonucleotide
  source 1..25: mol_type = other DNA
ctttcactgaacgttacaatccaaa

SEQ ID NO: 332 - DNA, 25 bp, synthetic construct
  misc_feature 1..25: note = Oligonucleotide
  source 1..25: mol_type = other DNA
tttctttcactgaacgttacaatcc

SEQ ID NO: 333 - DNA, 25 bp, synthetic construct
  misc_feature 1..25: note = Oligonucleotide
  source 1..25: mol_type = other DNA
aaatttctttcactgaacgttacaa

SEQ ID NO: 334 - DNA, 25 bp, synthetic construct
  misc_feature 1..25: note = Oligonucleotide
  source 1..25: mol_type = other DNA
ttgaaatttctttcactgaacgtta

SEQ ID NO: 335 - DNA, 25 bp, synthetic construct
  misc_feature 1..25: note = Oligonucleotide
  source 1..25: mol_type = other DNA
gggttgaaatttctttcactgaacg

SEQ ID NO: 336 - DNA, 25 bp, synthetic construct
  misc_feature 1..25: note = Oligonucleotide
  source 1..25: mol_type = other DNA
gaagggttgaaatttctttcactga

SEQ ID NO: 337 - DNA, 25 bp, synthetic construct
  misc_feature 1..25: note = Oligonucleotide
  source 1..25: mol_type = other DNA
tatgaagggttgaaatttctttcac

SEQ ID NO: 338 - DNA, 25 bp, synthetic construct
  misc_feature 1..25: note = Oligonucleotide
  source 1..25: mol_type = other DNA
ggctatgaagggttgaaatttcttt

SEQ ID NO: 339 - DNA, 25 bp, synthetic construct
  misc_feature 1..25: note = Oligonucleotide
  source 1..25: mol_type = other DNA
gctggctatgaagggttgaaatttc

SEQ ID NO: 340 - DNA, 25 bp, synthetic construct
  misc_feature 1..25: note = Oligonucleotide
  source 1..25: mol_type = other DNA
ttcgctggctatgaagggttgaaat

SEQ ID NO: 341 - DNA, 25 bp, synthetic construct
  misc_feature 1..25: note = Oligonucleotide
  source 1..25: mol_type = other DNA
ttcttcgctggctatgaagggttga

SEQ ID NO: 342 - DNA, 25 bp, synthetic construct
  misc_feature 1..25: note = Oligonucleotide
  source 1..25: mol_type = other DNA
aatttcttcgctggctatgaagggt

SEQ ID NO: 343 - DNA, 25 bp, synthetic construct
  misc_feature 1..25: note = Oligonucleotide
  source 1..25: mol_type = other DNA
gcaaatttcttcgctggctatgaag

SEQ ID NO: 344 - DNA, 25 bp, synthetic construct
  misc_feature 1..25: note = Oligonucleotide
  source 1..25: mol_type = other DNA
aaggcaaatttcttcgctggctatg

SEQ ID NO: 345 - DNA, 25 bp, synthetic construct
  misc_feature 1..25: note = Oligonucleotide
  source 1..25: mol_type = other DNA
tccaaggcaaatttcttcgctggct

SEQ ID NO: 346 - DNA, 25 bp, synthetic construct
  misc_feature 1..25: note = Oligonucleotide
  source 1..25: mol_type = other DNA
gcttccaaggcaaatttcttcgctg

SEQ ID NO: 347 - DNA, 25 bp, synthetic construct
  misc_feature 1..25: note = Oligonucleotide
  source 1..25: mol_type = other DNA
ttggcttccaaggcaaatttcttcg

SEQ ID NO: 348 - DNA, 25 bp, synthetic construct
  misc_feature 1..25: note = Oligonucleotide
  source 1..25: mol_type = other DNA
gacttggcttccaaggcaaatttct

SEQ ID NO: 349 - DNA, 25 bp, synthetic construct
  misc_feature 1..25: note = Oligonucleotide
  source 1..25: mol_type = other DNA
actgacttggcttccaaggcaaatt

SEQ ID NO: 350 - DNA, 25 bp, synthetic construct
  misc_feature 1..25: note = Oligonucleotide
  source 1..25: mol_type = other DNA
ggtactgacttggcttccaaggcaa

SEQ ID NO: 351 - DNA, 25 bp, synthetic construct
  misc_feature 1..25: note = Oligonucleotide
  source 1..25: mol_type = other DNA
gctggtactgacttggcttccaagg

SEQ ID NO: 352 - DNA, 25 bp, synthetic construct
  misc_feature 1..25: note = Oligonucleotide
  source 1..25: mol_type = other DNA
taagctggtactgacttggcttcca

SEQ ID NO: 353 - DNA, 25 bp, synthetic construct
  misc_feature 1..25: note = Oligonucleotide
  source 1..25: mol_type = other DNA
aggtaagctggtactgacttggctt

SEQ ID NO: 354 - DNA, 25 bp, synthetic construct
  misc_feature 1..25: note = Oligonucleotide
  source 1..25: mol_type = other DNA
aataggtaagctggtactgacttgg

SEQ ID NO: 355 - DNA, 25 bp, synthetic construct
  misc_feature 1..25: note = Oligonucleotide
  source 1..25: mol_type = other DNA
tcaaataggtaagctggtactgact

SEQ ID NO: 356 - DNA, 25 bp, synthetic construct
  misc_feature 1..25: note = Oligonucleotide
  source 1..25: mol_type = other DNA
gaatcaaataggtaagctggtactg

SEQ ID NO: 357 - DNA, 25 bp, synthetic construct
  misc_feature 1..25: note = Oligonucleotide
  source 1..25: mol_type = other DNA
actgaatcaaataggtaagctggta

SEQ ID NO: 358 - DNA, 25 bp, synthetic construct
  misc_feature 1..25: note = Oligonucleotide
  source 1..25: mol_type = other DNA
gcaactgaatcaaataggtaagctg

SEQ ID NO: 359 - DNA, 25 bp, synthetic construct
  misc_feature 1..25: note = Oligonucleotide
  source 1..25: mol_type = other DNA
acagcaactgaatcaaataggtaag

SEQ ID NO: 360 - DNA, 25 bp, synthetic construct
  misc_feature 1..25: note = Oligonucleotide
  source 1..25: mol_type = other DNA
aaaacagcaactgaatcaaataggt

SEQ ID NO: 361 - DNA, 25 bp, synthetic construct
  misc_feature 1..25: note = Oligonucleotide
  source 1..25: mol_type = other DNA
gagaaaacagcaactgaatcaaata

SEQ ID NO: 362 - DNA, 25 bp, synthetic construct
  misc_feature 1..25: note = Oligonucleotide
  source 1..25: mol_type = other DNA
agtgagaaaacagcaactgaatcaa

SEQ ID NO: 363 - DNA, 25 bp, synthetic construct
  misc_feature 1..25: note = Oligonucleotide
  source 1..25: mol_type = other DNA
gagagtgagaaaacagcaactgaat

SEQ ID NO: 364 - DNA, 25 bp, synthetic construct
  misc_feature 1..25: note = Oligonucleotide
  source 1..25: mol_type = other DNA
atagagagtgagaaaacagcaactg

SEQ ID NO: 365 - DNA, 25 bp, synthetic construct
  misc_feature 1..25: note = Oligonucleotide
  source 1..25: mol_type = other DNA
gatatagagagtgagaaaacagcaa

SEQ ID NO: 366 - DNA, 25 bp, synthetic construct
  misc_feature 1..25: note = Oligonucleotide
  source 1..25: mol_type = other DNA
atggatatagagagtgagaaaacag

SEQ ID NO: 367 - DNA, 25 bp, synthetic construct
  misc_feature 1..25: note = Oligonucleotide
  source 1..25: mol_type = other DNA
caaatggatatagagagtgagaaaa

SEQ ID NO: 368 - DNA, 25 bp, synthetic construct
  misc_feature 1..25: note = Oligonucleotide
  source 1..25: mol_type = other DNA
tttcaaatggatatagagagtgaga

SEQ ID NO: 369 - DNA, 25 bp, synthetic construct
  misc_feature 1..25: note = Oligonucleotide
  source 1..25: mol_type = other DNA
caatttcaaatggatatagagagtg

SEQ ID NO: 370 - DNA, 25 bp, synthetic construct
  misc_feature 1..25: note = Oligonucleotide
  source 1..25: mol_type = other DNA
aatcaatttcaaatggatatagaga

SEQ ID NO: 371 - DNA, 25 bp, synthetic construct
  misc_feature 1..25: note = Oligonucleotide
  source 1..25: mol_type = other DNA
ataaatcaatttcaaatggatatag

SEQ ID NO: 372 - DNA, 25 bp, synthetic construct
  misc_feature 1..25: note = Oligonucleotide
  source 1..25: mol_type = other DNA
aaaataaatcaatttcaaatggata

SEQ ID NO: 373 - DNA, 25 bp, synthetic construct
  misc_feature 1..25: note = Oligonucleotide
  source 1..25: mol_type = other DNA
tctaaaataaatcaatttcaaatgg

SEQ ID NO: 374 - DNA, 25 bp, synthetic construct
  misc_feature 1..25: note = Oligonucleotide
  source 1..25: mol_type = other DNA
acatctaaaataaatcaatttcaaa

SEQ ID NO: 375 - DNA, 25 bp, synthetic construct
  misc_feature 1..25: note = Oligonucleotide
  source 1..25: mol_type = other DNA
acaacatctaaaataaatcaatttc

SEQ ID NO: 376 - DNA, 25 bp, synthetic construct
  misc_feature 1..25: note = Oligonucleotide
  source 1..25: mol_type = other DNA
tatacaacatctaaaataaatcaat

SEQ ID NO: 377 - DNA, 25 bp, synthetic construct
  misc_feature 1..25: note = Oligonucleotide
  source 1..25: mol_type = other DNA
aagtatacaacatctaaaataaatc

SEQ ID NO: 378 - DNA, 25 bp, synthetic construct
  misc_feature 1..25: note = Oligonucleotide
  source 1..25: mol_type = other DNA
cgtaagtatacaacatctaaaataa

SEQ ID NO: 379 - DNA, 25 bp, synthetic construct
  misc_feature 1..25: note = Oligonucleotide
  source 1..25: mol_type = other DNA
taacgtaagtatacaacatctaaaa

SEQ ID NO: 380 - DNA, 25 bp, synthetic construct
  misc_feature 1..25: note = Oligonucleotide
  source 1..25: mol_type = other DNA
gcctaacgtaagtatacaacatcta

SEQ ID NO: 381 - DNA, 25 bp, synthetic construct
  misc_feature 1..25: note = Oligonucleotide
  source 1..25: mol_type = other DNA
aaagcctaacgtaagtatacaacat

SEQ ID NO: 382 - DNA, 25 bp, synthetic construct
  misc_feature 1..25: note = Oligonucleotide
  source 1..25: mol_type = other DNA
cagaaagcctaacgtaagtatacaa

SEQ ID NO: 383 - DNA, 25 bp, synthetic construct
  misc_feature 1..25: note = Oligonucleotide
  source 1..25: mol_type = other DNA
taacagaaagcctaacgtaagtata

SEQ ID NO: 384 - DNA, 25 bp, synthetic construct
  misc_feature 1..25: note = Oligonucleotide
  source 1..25: mol_type = other DNA
tattaacagaaagcctaacgtaagt

SEQ ID NO: 385 - DNA, 25 bp, synthetic construct
  misc_feature 1..25: note = Oligonucleotide
  source 1..25: mol_type = other DNA
cactattaacagaaagcctaacgta

SEQ ID NO: 386 - DNA, 25 bp, synthetic construct
  misc_feature 1..25: note = Oligonucleotide
  source 1..25: mol_type = other DNA
aaccactattaacagaaagcctaac

SEQ ID NO: 387 - DNA, 25 bp, synthetic construct
  misc_feature 1..25: note = Oligonucleotide
  source 1..25: mol_type = other DNA
aaaaaccactattaacagaaagcct

SEQ ID NO: 388 - DNA, 25 bp, synthetic construct
  misc_feature 1..25: note = Oligonucleotide
  source 1..25: mol_type = other DNA
gagaaaaaccactattaacagaaag

SEQ ID NO: 389 - DNA, 25 bp, synthetic construct
  misc_feature 1..25: note = Oligonucleotide
  source 1..25: mol_type = other DNA
caggagaaaaaccactattaacaga

SEQ ID NO: 390 - DNA, 25 bp, synthetic construct
  misc_feature 1..25: note = Oligonucleotide
  source 1..25: mol_type = other DNA
caacaggagaaaaaccactattaac

SEQ ID NO: 391 - DNA, 25 bp, synthetic construct
  misc_feature 1..25: note = Oligonucleotide
  source 1..25: mol_type = other DNA
tgtcaacaggagaaaaaccactatt

SEQ ID NO: 392 - DNA, 25 bp, synthetic construct
  misc_feature 1..25: note = Oligonucleotide
  source 1..25: mol_type = other DNA
ctctgtcaacaggagaaaaaccact

SEQ ID NO: 393 - DNA, 25 bp, synthetic construct
  misc_feature 1..25: note = Oligonucleotide
  source 1..25: mol_type = other DNA
tggctctgtcaacaggagaaaaacc

SEQ ID NO: 394 - DNA, 25 bp, synthetic construct
  misc_feature 1..25: note = Oligonucleotide
  source 1..25: mol_type = other DNA
cggtggctctgtcaacaggagaaaa

SEQ ID NO: 395 - DNA, 25 bp, synthetic construct
  misc_feature 1..25: note = Oligonucleotide
  source 1..25: mol_type = other DNA
atccggtggctctgtcaacaggaga

SEQ ID NO: 396 - DNA, 25 bp, synthetic construct
  misc_feature 1..25: note = Oligonucleotide
  source 1..25: mol_type = other DNA
ataatccggtggctctgtcaacagg

SEQ ID NO: 397 - DNA, 25 bp, synthetic construct
  misc_feature 1..25: note = Oligonucleotide
  source 1..25: mol_type = other DNA
gtcataatccggtggctctgtcaac

SEQ ID NO: 398 - DNA, 25 bp, synthetic construct
  misc_feature 1..25: note = Oligonucleotide
  source 1..25: mol_type = other DNA
tgtgtcataatccggtggctctgtc

SEQ ID NO: 399 - DNA, 25 bp, synthetic construct
  misc_feature 1..25: note = Oligonucleotide
  source 1..25: mol_type = other DNA
tcctgtgtcataatccggtggctct

SEQ ID NO: 400 - DNA, 25 bp, synthetic construct
  misc_feature 1..25: note = Oligonucleotide
  source 1..25: mol_type = other DNA
tcatcctgtgtcataatccggtggc

SEQ ID NO: 401 - DNA, 25 bp, synthetic construct
  misc_feature 1..25: note = Oligonucleotide
  source 1..25: mol_type = other DNA
tcctcatcctgtgtcataatccggt

SEQ ID NO: 402 - DNA, 25 bp, synthetic construct
  misc_feature 1..25: note = Oligonucleotide
  source 1..25: mol_type = other DNA
tcttcctcatcctgtgtcataatcc

SEQ ID NO: 403 - DNA, 25 bp, synthetic construct
  misc_feature 1..25: note = Oligonucleotide
  source 1..25: mol_type = other DNA
taatcttcctcatcctgtgtcataa

SEQ ID NO: 404 - DNA, 25 bp, synthetic construct
  misc_feature 1..25: note = Oligonucleotide
  source 1..25: mol_type = other DNA
ccttaatcttcctcatcctgtgtca

SEQ ID NO: 405 - DNA, 25 bp, synthetic construct
  misc_feature 1..25: note = Oligonucleotide
  source 1..25: mol_type = other DNA
tatccttaatcttcctcatcctgtg

SEQ ID NO: 406 - DNA, 25 bp, synthetic construct
  misc_feature 1..25: note = Oligonucleotide
  source 1..25: mol_type = other DNA
gattatccttaatcttcctcatcct

SEQ ID NO: 407 - DNA, 25 bp, synthetic construct
  misc_feature 1..25: note = Oligonucleotide
  source 1..25: mol_type = other DNA
attgattatccttaatcttcctcat

SEQ ID NO: 408 - DNA, 25 bp, synthetic construct
  misc_feature 1..25: note = Oligonucleotide
  source 1..25: mol_type = other DNA
tcaattgattatccttaatcttcct

SEQ ID NO: 409 - DNA, 25 bp, synthetic construct
  misc_feature 1..25: note = Oligonucleotide
  source 1..25: mol_type = other DNA
tagtcaattgattatccttaatctt

SEQ ID NO: 410 - DNA, 25 bp, synthetic construct
  misc_feature 1..25: note = Oligonucleotide
  source 1..25: mol_type = other DNA
aattagtcaattgattatccttaat

SEQ ID NO: 411 - DNA, 25 bp, synthetic construct
  misc_feature 1..25: note = Oligonucleotide
  source 1..25: mol_type = other DNA
tgaaattagtcaattgattatcctt

SEQ ID NO: 412 - DNA, 25 bp, synthetic construct
  misc_feature 1..25: note = Oligonucleotide
  source 1..25: mol_type = other DNA
aaatgaaattagtcaattgattatc

SEQ ID NO: 413 - DNA, 25 bp, synthetic construct
  misc_feature 1..25: note = Oligonucleotide
  source 1..25: mol_type = other DNA
tctaaatgaaattagtcaattgatt

SEQ ID NO: 414 - DNA, 25 bp, synthetic construct
  misc_feature 1..25: note = Oligonucleotide
  source 1..25: mol_type = other DNA
tattctaaatgaaattagtcaattg

SEQ ID NO: 415 - DNA, 25 bp, synthetic construct
  misc_feature 1..25: note = Oligonucleotide
  source 1..25: mol_type = other DNA
taatattctaaatgaaattagtcaa

SEQ ID NO: 416 - DNA, 25 bp, synthetic construct
  misc_feature 1..25: note = Oligonucleotide
  source 1..25: mol_type = other DNA
tgataatattctaaatgaaattagt

SEQ ID NO: 417 - DNA, 25 bp, synthetic construct
  misc_feature 1..25: note = Oligonucleotide
  source 1..25: mol_type = other DNA
gtttgataatattctaaatgaaatt

SEQ ID NO: 418 - DNA, 25 bp, synthetic construct
  misc_feature 1..25: note = Oligonucleotide
  source 1..25: mol_type = other DNA
aatgtttgataatattctaaatgaa

SEQ ID NO: 419 - DNA, 25 bp, synthetic construct
  misc_feature 1..25: note = Oligonucleotide
  source 1..25: mol_type = other DNA
tgaaatgtttgataatattctaaat

SEQ ID NO: 420 - DNA, 25 bp, synthetic construct
  misc_feature 1..25: note = Oligonucleotide
  source 1..25: mol_type = other DNA
agttgaaatgtttgataatattcta

SEQ ID NO: 421 - DNA, 25 bp, synthetic construct
  misc_feature 1..25: note = Oligonucleotide
  source 1..25: mol_type = other DNA
cctagttgaaatgtttgataatatt

SEQ ID NO: 422 - DNA, 25 bp, synthetic construct
  misc_feature 1..25: note = Oligonucleotide
  source 1..25: mol_type = other DNA
atacctagttgaaatgtttgataat

SEQ ID NO: 423 - DNA, 25 bp, synthetic construct
  misc_feature 1..25: note = Oligonucleotide
  source 1..25: mol_type = other DNA
ctgatacctagttgaaatgtttgat

SEQ ID NO: 424 - DNA, 25 bp, synthetic construct
  misc_feature 1..25: note = Oligonucleotide
  source 1..25: mol_type = other DNA
tttctgatacctagttgaaatgttt

SEQ ID NO: 425 - DNA, 25 bp, synthetic construct
  misc_feature 1..25: note = Oligonucleotide
  source 1..25: mol_type = other DNA
ctttttctgatacctagttgaaatg

SEQ ID NO: 426 - DNA, 25 bp, synthetic construct
  misc_feature 1..25: note = Oligonucleotide
  source 1..25: mol_type = other DNA
agcctttttctgatacctagttgaa

SEQ ID NO: 427 - DNA, 25 bp, synthetic construct
  misc_feature 1..25: note = Oligonucleotide
  source 1..25: mol_type = other DNA
gaaagcctttttctgatacctagtt

SEQ ID NO: 428 - DNA, 25 bp, synthetic construct
  misc_feature 1..25: note = Oligonucleotide
  source 1..25: mol_type = other DNA
aaagaaagcctttttctgataccta

SEQ ID NO: 429 - DNA, 25 bp, synthetic construct
  misc_feature 1..25: note = Oligonucleotide
  source 1..25: mol_type = other DNA
atgaaagaaagcctttttctgatac

SEQ ID NO: 430 - DNA, 25 bp, synthetic construct
  misc_feature 1..25: note = Oligonucleotide
  source 1..25: mol_type = other DNA
cttatgaaagaaagcctttttctga

SEQ ID NO: 431 - DNA, 25 bp, synthetic construct
  misc_feature 1..25: note = Oligonucleotide
  source 1..25: mol_type = other DNA
agtcttatgaaagaaagcctttttc

SEQ ID NO: 432 - DNA, 25 bp, synthetic construct
  misc_feature 1..25: note = Oligonucleotide
  source 1..25: mol_type = other DNA
aatagtcttatgaaagaaagccttt

SEQ ID NO: 433 - DNA, 25 bp, synthetic construct
  misc_feature 1..25: note = Oligonucleotide
  source 1..25: mol_type = other DNA
taaaatagtcttatgaaagaaagcc

SEQ ID NO: 434 - DNA, 25 bp, synthetic construct
  misc_feature 1..25: note = Oligonucleotide
  source 1..25: mol_type = other DNA
atttaaaatagtcttatgaaagaaa

SEQ ID NO: 435 - DNA, 25 bp, synthetic construct
  misc_feature 1..25: note = Oligonucleotide
  source 1..25: mol_type = other DNA
tctatttaaaatagtcttatgaaag

SEQ ID NO: 436 - DNA, 25 bp, synthetic construct
  misc_feature 1..25: note = Oligonucleotide
  source 1..25: mol_type = other DNA
atttctatttaaaatagtcttatga

SEQ ID NO: 437 - DNA, 25 bp, synthetic construct
  misc_feature 1..25: note = Oligonucleotide
  source 1..25: mol_type = other DNA
ataatttctatttaaaatagtctta

SEQ ID NO: 438 - DNA, 25 bp, synthetic construct
  misc_feature 1..25: note = Oligonucleotide
  source 1..25: mol_type = other DNA
gaaataatttctatttaaaatagtc

SEQ ID NO: 439 - DNA, 25 bp, synthetic construct
  misc_feature 1..25: note = Oligonucleotide
  source 1..25: mol_type = other DNA
gttgaaataatttctatttaaaata

SEQ ID NO: 440 - DNA, 25 bp, synthetic construct
  misc_feature 1..25: note = Oligonucleotide
  source 1..25: mol_type = other DNA
attgttgaaataatttctatttaaa

SEQ ID NO: 441 - DNA, 25 bp, synthetic construct
  misc_feature 1..25: note = Oligonucleotide
  source 1..25: mol_type = other DNA
ttaattgttgaaataatttctattt

SEQ ID NO: 442 - DNA, 25 bp, synthetic construct
  misc_feature 1..25: note = Oligonucleotide
  source 1..25: mol_type = other DNA
actttaattgttgaaataatttcta

SEQ ID NO: 443 - DNA, 25 bp, synthetic construct
  misc_feature 1..25: note = Oligonucleotide
  source 1..25: mol_type = other DNA
attactttaattgttgaaataattt

SEQ ID NO: 444 - DNA, 25 bp, synthetic construct
  misc_feature 1..25: note = Oligonucleotide
  source 1..25: mol_type = other DNA
aacattactttaattgttgaaataa

SEQ ID NO: 445 - DNA, 25 bp, synthetic construct
  misc_feature 1..25: note = Oligonucleotide
  source 1..25: mol_type = other DNA
gtcaacattactttaattgttgaaa

SEQ ID NO: 446 - DNA, 25 bp, synthetic construct
  misc_feature 1..25: note = Oligonucleotide
  source 1..25: mol_type = other DNA
atggtcaacattactttaattgttg

SEQ ID NO: 447 - DNA, 25 bp, synthetic construct
  misc_feature 1..25: note = Oligonucleotide
  source 1..25: mol_type = other DNA
gggatggtcaacattactttaattg

SEQ ID NO: 448 - DNA, 25 bp, synthetic construct
  misc_feature 1..25: note = Oligonucleotide
  source 1..25: mol_type = other DNA
agggggatggtcaacattactttaa

SEQ ID NO: 449 - DNA, 25 bp, synthetic construct
  misc_feature 1..25: note = Oligonucleotide
  source 1..25: mol_type = other DNA
gagagggggatggtcaacattactt

SEQ ID NO: 450 - DNA, 25 bp, synthetic construct
  misc_feature 1..25: note = Oligonucleotide
  source 1..25: mol_type = other DNA
gctgagagggggatggtcaacatta

SEQ ID NO: 451 - DNA, 25 bp, synthetic construct
  misc_feature 1..25: note = Oligonucleotide
  source 1..25: mol_type = other DNA
tcagctgagagggggatggtcaaca

SEQ ID NO: 452 - DNA, 25 bp, synthetic construct
  misc_feature 1..25: note = Oligonucleotide
  source 1..25: mol_type = other DNA
tattcagctgagagggggatggtca

SEQ ID NO: 453 - DNA, 25 bp, synthetic construct
  misc_feature 1..25: note = Oligonucleotide
  source 1..25: mol_type = other DNA
ctttattcagctgagagggggatgg

SEQ ID NO: 454 - DNA, 25 bp, synthetic construct
  misc_feature 1..25: note = Oligonucleotide
  source 1..25: mol_type = other DNA
tttctttattcagctgagaggggga

SEQ ID NO: 455 - DNA, 25 bp, synthetic construct
  misc_feature 1..25: note = Oligonucleotide
  source 1..25: mol_type = other DNA
atttttctttattcagctgagaggg

SEQ ID NO: 456 - DNA, 25 bp, synthetic construct
  misc_feature 1..25: note = Oligonucleotide
  source 1..25: mol_type = other DNA
taaatttttctttattcagctgaga

SEQ ID NO: 457 - DNA, 25 bp, synthetic construct
  misc_feature 1..25: note = Oligonucleotide
  source 1..25: mol_type = other DNA
aactaaatttttctttattcagctg

SEQ ID NO: 458 - DNA, 25 bp, synthetic construct
  misc_feature 1..25: note = Oligonucleotide
  source 1..25: mol_type = other DNA
ttgaactaaatttttctttattcag

SEQ ID NO: 459 - DNA, 25 bp, synthetic construct
  misc_feature 1..25: note = Oligonucleotide
  source 1..25: mol_type = other DNA
aaattgaactaaatttttctttatt

SEQ ID NO: 460 - DNA, 25 bp, synthetic construct
  misc_feature 1..25: note = Oligonucleotide
  source 1..25: mol_type = other DNA
aataaattgaactaaatttttcttt

SEQ ID NO: 461 - DNA, 25 bp, synthetic construct
  misc_feature 1..25: note = Oligonucleotide
  source 1..25: mol_type = other DNA
tgcaataaattgaactaaatttttc

SEQ ID NO: 462 - DNA, 25 bp, synthetic construct
  misc_feature 1..25: note = Oligonucleotide
  source 1..25: mol_type = other DNA
aattgcaataaattgaactaaattt

SEQ ID NO: 463 - DNA, 25 bp, synthetic construct
  misc_feature 1..25: note = Oligonucleotide
  source 1..25: mol_type = other DNA
ttaaattgcaataaattgaactaaa

SEQ ID NO: 464 - DNA, 25 bp, synthetic construct
  misc_feature 1..25: note = Oligonucleotide
  source 1..25: mol_type = other DNA
taattaaattgcaataaattgaact

SEQ ID NO: 465 - DNA, 25 bp, synthetic construct
  misc_feature 1..25: note = Oligonucleotide
  source 1..25: mol_type = other DNA
ttgtaattaaattgcaataaattga

SEQ ID NO: 466 - DNA, 25 bp, synthetic construct
  misc_feature 1..25: note = Oligonucleotide
  source 1..25: mol_type = other DNA
gtattgtaattaaattgcaataaat

SEQ ID NO: 467 - DNA, 25 bp, synthetic construct
  misc_feature 1..25: note = Oligonucleotide
  source 1..25: mol_type = other DNA
gtagtattgtaattaaattgcaata

SEQ ID NO: 468 - DNA, 25 bp, synthetic construct
  misc_feature 1..25: note = Oligonucleotide
  source 1..25: mol_type = other DNA
aaggtagtattgtaattaaattgca

SEQ ID NO: 469 - DNA, 25 bp, synthetic construct
  misc_feature 1..25: note = Oligonucleotide
  source 1..25: mol_type = other DNA
gtgaaggtagtattgtaattaaatt

SEQ ID NO: 470 - DNA, 25 bp, synthetic construct
  misc_feature 1..25: note = Oligonucleotide
  source 1..25: mol_type = other DNA
gttgtgaaggtagtattgtaattaa

SEQ ID NO: 471 - DNA, 25 bp, synthetic construct
  misc_feature 1..25: note = Oligonucleotide
  source 1..25: mol_type = other DNA
aatgttgtgaaggtagtattgtaat

SEQ ID NO: 472 - DNA, 25 bp, synthetic construct
  misc_feature 1..25: note = Oligonucleotide
  source 1..25: mol_type = other DNA
gaaaatgttgtgaaggtagtattgt

SEQ ID NO: 473 - DNA, 25 bp, synthetic construct
  misc_feature 1..25: note = Oligonucleotide
  source 1..25: mol_type = other DNA
catgaaaatgttgtgaaggtagtat

SEQ ID NO: 474 - DNA, 25 bp, synthetic construct
  misc_feature 1..25: note = Oligonucleotide
  source 1..25: mol_type = other DNA
acacatgaaaatgttgtgaaggtag

SEQ ID NO: 475 - DNA, 25 bp, synthetic construct
  misc_feature 1..25: note = Oligonucleotide
  source 1..25: mol_type = other DNA
aaaacacatgaaaatgttgtgaagg

SEQ ID NO: 476 - DNA, 25 bp, synthetic construct
  misc_feature 1..25: note = Oligonucleotide
  source 1..25: mol_type = other DNA
tttaaaacacatgaaaatgttgtga

SEQ ID NO: 477 - DNA, 25 bp, synthetic construct
  misc_feature 1..25: note = Oligonucleotide
  source 1..25: mol_type = other DNA
ttatttaaaacacatgaaaatgttg

SEQ ID NO: 478 - DNA, 25 bp, synthetic construct
  misc_feature 1..25: note = Oligonucleotide
  source 1..25: mol_type = other DNA
tatttatttaaaacacatgaaaatg

SEQ ID NO: 479 - DNA, 25 bp, synthetic construct
  misc_feature 1..25: note = Oligonucleotide
  source 1..25: mol_type = other DNA
aaatatttatttaaaacacatgaaa

SEQ ID NO: 480 - DNA, 25 bp, synthetic construct
  misc_feature 1..25: note = Oligonucleotide
  source 1..25: mol_type = other DNA
aaaaaatatttatttaaaacacatg

SEQ ID NO: 481 - DNA, 25 bp, synthetic construct
  misc_feature 1..25: note = Oligonucleotide
  source 1..25: mol_type = other DNA
attaaaaaatatttatttaaaacac

SEQ ID NO: 482 - DNA, 25 bp, synthetic construct
  misc_feature 1..25: note = Oligonucleotide
  source 1..25: mol_type = other DNA
ccaattaaaaaatatttatttaaaa

SEQ ID NO: 483 - DNA, 25 bp, synthetic construct
  misc_feature 1..25: note = Oligonucleotide
  source 1..25: mol_type = other DNA
tagccaattaaaaaatatttattta

SEQ ID NO: 484 - DNA, 25 bp, synthetic construct
  misc_feature 1..25: note = Oligonucleotide
  source 1..25: mol_type = other DNA
ctttagccaattaaaaaatatttat

SEQ ID NO: 485 - DNA, 25 bp, synthetic construct
  misc_feature 1..25: note = Oligonucleotide
  source 1..25: mol_type = other DNA
gtcctttagccaattaaaaaatatt

SEQ ID NO: 486 - DNA, 25 bp, synthetic construct
  misc_feature 1..25: note = Oligonucleotide
  source 1..25: mol_type = other DNA
aatgtcctttagccaattaaaaaat

SEQ ID NO: 487 - DNA, 25 bp, synthetic construct
  misc_feature 1..25: note = Oligonucleotide
  source 1..25: mol_type = other DNA
ttgaatgtcctttagccaattaaaa

SEQ ID NO: 488 - DNA, 25 bp, synthetic construct
  misc_feature 1..25: note = Oligonucleotide
  source 1..25: mol_type = other DNA
tgcttgaatgtcctttagccaatta

SEQ ID NO: 489 - DNA, 25 bp, synthetic construct
  misc_feature 1..25: note = Oligonucleotide
  source 1..25: mol_type = other DNA
ctttgcttgaatgtcctttagccaa

SEQ ID NO: 490 - DNA, 25 bp, synthetic construct
  misc_feature 1..25: note = Oligonucleotide
  source 1..25: mol_type = other DNA
tttctttgcttgaatgtcctttagc

SEQ ID NO: 491 - DNA, 25 bp, synthetic construct
  misc_feature 1..25: note = Oligonucleotide
  source 1..25: mol_type = other DNA
gcatttctttgcttgaatgtccttt

SEQ ID NO: 492 - DNA, 25 bp, synthetic construct
  misc_feature 1..25: note = Oligonucleotide
  source 1..25: mol_type = other DNA
aaagcatttctttgcttgaatgtcc

SEQ ID NO: 493 - DNA, 25 bp, synthetic construct
  misc_feature 1..25: note = Oligonucleotide
  source 1..25: mol_type = other DNA
aagaaagcatttctttgcttgaatg

SEQ ID NO: 494 - DNA, 25 bp, synthetic construct
  misc_feature 1..25: note = Oligonucleotide
  source 1..25: mol_type = other DNA
gtaaagaaagcatttctttgcttga

SEQ ID NO: 495 - DNA, 25 bp, synthetic construct
  misc_feature 1..25: note = Oligonucleotide
  source 1..25: mol_type = other DNA
taagtaaagaaagcatttctttgct

SEQ ID NO: 496 - DNA, 25 bp, synthetic construct
  misc_feature 1..25: note = Oligonucleotide
  source 1..25: mol_type = other DNA
ttttaagtaaagaaagcatttcttt

SEQ ID NO: 497 - DNA, 25 bp, synthetic construct
  misc_feature 1..25: note = Oligonucleotide
  source 1..25: mol_type = other DNA
acattttaagtaaagaaagcatttc

SEQ ID NO: 498 - DNA, 25 bp, synthetic construct
  misc_feature 1..25: note = Oligonucleotide
  source 1..25: mol_type = other DNA
tagacattttaagtaaagaaagcat

SEQ ID NO: 499 - DNA, 25 bp, synthetic construct
  misc_feature 1..25: note = Oligonucleotide
  source 1..25: mol_type = other DNA
agatagacattttaagtaaagaaag

SEQ ID NO: 500 - DNA, 25 bp, synthetic construct
  misc_feature 1..25: note = Oligonucleotide
  source 1..25: mol_type = other DNA
atgagatagacattttaagtaaaga

SEQ ID NO: 501 - DNA, 25 bp, synthetic construct
  misc_feature 1..25: note = Oligonucleotide
  source 1..25: mol_type = other DNA
caaatgagatagacattttaagtaa

SEQ ID NO: 502 - DNA, 25 bp, synthetic construct
  misc_feature 1..25: note = Oligonucleotide
  source 1..25: mol_type = other DNA
cagcaaatgagatagacattttaag

SEQ ID NO: 503 - DNA, 25 bp, synthetic construct
  misc_feature 1..25: note = Oligonucleotide
  source 1..25: mol_type = other DNA
aggcagcaaatgagatagacatttt

SEQ ID NO: 504 - DNA, 25 bp, synthetic construct
  misc_feature 1..25: note = Oligonucleotide
  source 1..25: mol_type = other DNA
aaaaggcagcaaatgagatagacat

SEQ ID NO: 505 - DNA, 25 bp, synthetic construct
  misc_feature 1..25: note = Oligonucleotide
  source 1..25: mol_type = other DNA
gtgaaaaggcagcaaatgagataga

SEQ ID NO: 506 - DNA, 25 bp, synthetic construct
  misc_feature 1..25: note = Oligonucleotide
  source 1..25: mol_type = other DNA
ttagtgaaaaggcagcaaatgagat

SEQ ID NO: 507 - DNA, 25 bp, synthetic construct
  misc_feature 1..25: note = Oligonucleotide
  source 1..25: mol_type = other DNA
ggcttagtgaaaaggcagcaaatga

SEQ ID NO: 508 - DNA, 25 bp, synthetic construct
  misc_feature 1..25: note = Oligonucleotide
  source 1..25: mol_type = other DNA
aaaggcttagtgaaaaggcagcaaa

SEQ ID NO: 509 - DNA, 25 bp, synthetic construct
  misc_feature 1..25: note = Oligonucleotide
  source 1..25: mol_type = other DNA
agtaaaggcttagtgaaaaggcagc

SEQ ID NO: 510 - DNA, 25 bp, synthetic construct
  misc_feature 1..25: note = Oligonucleotide
  source 1..25: mol_type = other DNA
caaagtaaaggcttagtgaaaaggc

SEQ ID NO: 511 - DNA, 25 bp, synthetic construct
  misc_feature 1..25: note = Oligonucleotide
  source 1..25: mol_type = other DNA
taacaaagtaaaggcttagtgaaaa

SEQ ID NO: 512 - DNA, 25 bp, synthetic construct
  misc_feature 1..25: note = Oligonucleotide
  source 1..25: mol_type = other DNA
tattaacaaagtaaaggcttagtga

SEQ ID NO: 513 - DNA, 25 bp, synthetic construct
  misc_feature 1..25: note = Oligonucleotide
  source 1..25: mol_type = other DNA
ttttattaacaaagtaaaggcttag

SEQ ID NO: 514 - DNA, 25 bp, synthetic construct
  misc_feature 1..25: note = Oligonucleotide
  source 1..25: mol_type = other DNA
cacttttattaacaaagtaaaggct

SEQ ID NO: 515 - DNA, 25 bp, synthetic construct
  misc_feature 1..25: note = Oligonucleotide
  source 1..25: mol_type = other DNA
ggacacttttattaacaaagtaaag

SEQ ID NO: 516 - DNA, 25 bp, synthetic construct
  misc_feature 1..25: note = Oligonucleotide
  source 1..25: mol_type = other DNA
aatggacacttttattaacaaagta

SEQ ID NO: 517 - DNA, 25 bp, synthetic construct
  misc_feature 1..25: note = Oligonucleotide
  source 1..25: mol_type = other DNA
cacaatggacacttttattaacaaa

SEQ ID NO: 518 - DNA, 25 bp, synthetic construct
  misc_feature 1..25: note = Oligonucleotide
  source 1..25: mol_type = other DNA
tcacacaatggacacttttattaac

SEQ ID NO: 519 - DNA, 25 bp, synthetic construct
  misc_feature 1..25: note = Oligonucleotide
  source 1..25: mol_type = other DNA
acatcacacaatggacacttttatt

SEQ ID NO: 520 - DNA, 25 bp, synthetic construct
  misc_feature 1..25: note = Oligonucleotide
  source 1..25: mol_type = other DNA
aaaacatcacacaatggacactttt

SEQ ID NO: 521 - DNA, 25 bp, synthetic construct
  misc_feature 1..25: note = Oligonucleotide
  source 1..25: mol_type = other DNA
tcaaaaacatcacacaatggacact

SEQ ID NO: 522 - DNA, 25 bp, synthetic construct
  misc_feature 1..25: note = Oligonucleotide
  source 1..25: mol_type = other DNA
aaatcaaaaacatcacacaatggac

SEQ ID NO: 523 - DNA, 25 bp, synthetic construct
  misc_feature 1..25: note = Oligonucleotide
  source 1..25: mol_type = other DNA
gtaaaatcaaaaacatcacacaatg

SEQ ID NO: 524 - DNA, 25 bp, synthetic construct
  misc_feature 1..25: note = Oligonucleotide
  source 1..25: mol_type = other DNA
actgtaaaatcaaaaacatcacaca

SEQ ID NO: 525 - DNA, 25 bp, synthetic construct
  misc_feature 1..25: note = Oligonucleotide
  source 1..25: mol_type = other DNA
caaactgtaaaatcaaaaacatcac

SEQ ID NO: 526 - DNA, 25 bp, synthetic construct
  misc_feature 1..25: note = Oligonucleotide
  source 1..25: mol_type = other DNA
tagcaaactgtaaaatcaaaaacat

SEQ ID NO: 527 - DNA, 25 bp, synthetic construct
  misc_feature 1..25: note = Oligonucleotide
  source 1..25: mol_type = other DNA
atttagcaaactgtaaaatcaaaaa

SEQ ID NO: 528 - DNA, 25 bp, synthetic construct
  misc_feature 1..25: note = Oligonucleotide
  source 1..25: mol_type = other DNA
aagatttagcaaactgtaaaatcaa

SEQ ID NO: 529 - DNA, 25 bp, synthetic construct
  misc_feature 1..25: note = Oligonucleotide
  source 1..25: mol_type = other DNA
aataagatttagcaaactgtaaaat

SEQ ID NO: 530 - DNA, 25 bp, synthetic construct
  misc_feature 1..25: note = Oligonucleotide
  source 1..25: mol_type = other DNA
gaaaataagatttagcaaactgtaa

SEQ ID NO: 531 - DNA, 25 bp, synthetic construct
  misc_feature 1..25: note = Oligonucleotide
  source 1..25: mol_type = other DNA
caagaaaataagatttagcaaactg

SEQ ID NO: 532 - DNA, 25 bp, synthetic construct
  misc_feature 1..25: note = Oligonucleotide
  source 1..25: mol_type = other DNA
ctccaagaaaataagatttagcaaa

SEQ ID NO: 533 - DNA, 25 bp, synthetic construct
  misc_feature 1..25: note = Oligonucleotide
  source 1..25: mol_type = other DNA
caactccaagaaaataagatttagc

SEQ ID NO: 534 - DNA, 25 bp, synthetic construct
  misc_feature 1..25: note = Oligonucleotide
  source 1..25: mol_type = other DNA
aagcaactccaagaaaataagattt

SEQ ID NO: 535 - DNA, 25 bp, synthetic construct
  misc_feature 1..25: note = Oligonucleotide
  source 1..25: mol_type = other DNA
aaaaagcaactccaagaaaataaga

SEQ ID NO: 536 - DNA, 25 bp, synthetic construct
  misc_feature 1..25: note = Oligonucleotide
  source 1..25: mol_type = other DNA
accaaaaagcaactccaagaaaata

SEQ ID NO: 537 - DNA, 25 bp, synthetic construct
  misc_feature 1..25: note = Oligonucleotide
  source 1..25: mol_type = other DNA
gttaccaaaaagcaactccaagaaa

SEQ ID NO: 538 - DNA, 25 bp, synthetic construct
  misc_feature 1..25: note = Oligonucleotide
  source 1..25: mol_type = other DNA
gctgttaccaaaaagcaactccaag

SEQ ID NO: 539 - DNA, 25 bp, synthetic construct
  misc_feature 1..25: note = Oligonucleotide
  source 1..25: mol_type = other DNA
ggggctgttaccaaaaagcaactcc

SEQ ID NO: 540 - DNA, 25 bp, synthetic construct
  misc_feature 1..25: note = Oligonucleotide
  source 1..25: mol_type = other DNA
aatggggctgttaccaaaaagcaac

SEQ ID NO: 541 - DNA, 25 bp, synthetic construct
  misc_feature 1..25: note = Oligonucleotide
  source 1..25: mol_type = other DNA
agcaatggggctgttaccaaaaagc

SEQ ID NO: 542 - DNA, 25 bp, synthetic construct
  misc_feature 1..25: note = Oligonucleotide
  source 1..25: mol_type = other DNA
agtagcaatggggctgttaccaaaa

SEQ ID NO: 543 - DNA, 25 bp, synthetic construct
  misc_feature 1..25: note = Oligonucleotide
  source 1..25: mol_type = other DNA
gggagtagcaatggggctgttacca

SEQ ID NO: 544 - DNA, 25 bp, synthetic construct
  misc_feature 1..25: note = Oligonucleotide
  source 1..25: mol_type = other DNA
atggggagtagcaatggggctgtta

SEQ ID NO: 545 - DNA, 25 bp, synthetic construct
  misc_feature 1..25: note = Oligonucleotide
  source 1..25: mol_type = other DNA
aaaatggggagtagcaatggggctg

SEQ ID NO: 546 - DNA, 25 bp, synthetic construct
  misc_feature 1..25: note = Oligonucleotide
  source 1..25: mol_type = other DNA
aataaaatggggagtagcaatgggg

SEQ ID NO: 547 - DNA, 25 bp, synthetic construct
  misc_feature 1..25: note = Oligonucleotide
  source 1..25: mol_type = other DNA
aacaataaaatggggagtagcaatg

SEQ ID NO: 548 - DNA, 25 bp, synthetic construct
  misc_feature 1..25: note = Oligonucleotide
  source 1..25: mol_type = other DNA
taaaacaataaaatggggagtagca

SEQ ID NO: 549 - DNA, 25 bp, synthetic construct
  misc_feature 1..25: note = Oligonucleotide
  source 1..25: mol_type = other DNA
atgtaaaacaataaaatggggagta

SEQ ID NO: 550 - DNA, 25 bp, synthetic construct
  misc_feature 1..25: note = Oligonucleotide
  source 1..25: mol_type = other DNA
ttgatgtaaaacaataaaatgggga

SEQ ID NO: 551 - DNA, 25 bp, synthetic construct
  misc_feature 1..25: note = Oligonucleotide
  source 1..25: mol_type = other DNA
gcattgatgtaaaacaataaaatgg

SEQ ID NO: 552 - DNA, 25 bp, synthetic construct
  misc_feature 1..25: note = Oligonucleotide
  source 1..25: mol_type = other DNA
catgcattgatgtaaaacaataaaa

SEQ ID NO: 553 - DNA, 25 bp, synthetic construct
  misc_feature 1..25: note = Oligonucleotide
  source 1..25: mol_type = other DNA
aagcatgcattgatgtaaaacaata

SEQ ID NO: 554 - DNA, 25 bp, synthetic construct
  misc_feature 1..25: note = Oligonucleotide
  source 1..25: mol_type = other DNA
acgaagcatgcattgatgtaaaaca

SEQ ID NO: 555 - DNA, 25 bp, synthetic construct
  misc_feature 1..25: note = Oligonucleotide
  source 1..25: mol_type = other DNA
acaacgaagcatgcattgatgtaaa

SEQ ID NO: 556 - DNA, 25 bp, synthetic construct
  misc_feature 1..25: note = Oligonucleotide
  source 1..25: mol_type = other DNA
atcacaacgaagcatgcattgatgt

SEQ ID NO: 557 - DNA, 25 bp, synthetic construct
  misc_feature 1..25: note = Oligonucleotide
  source 1..25: mol_type = other DNA
gggatcacaacgaagcatgcattga

SEQ ID NO: 558 - DNA, 25 bp, synthetic construct
  misc_feature 1..25: note = Oligonucleotide
  source 1..25: mol_type = other DNA
tgagggatcacaacgaagcatgcat

SEQ ID NO: 559 - DNA, 25 bp, synthetic construct
  misc_feature 1..25: note = Oligonucleotide
  source 1..25: mol_type = other DNA
tcttgagggatcacaacgaagcatg

SEQ ID NO: 560 - DNA, 25 bp, synthetic construct
  misc_feature 1..25: note = Oligonucleotide
  source 1..25: mol_type = other DNA
acatcttgagggatcacaacgaagc

SEQ ID NO: 561 - DNA, 25 bp, synthetic construct
  misc_feature 1..25: note = Oligonucleotide
  source 1..25: mol_type = other DNA
gttacatcttgagggatcacaacga

SEQ ID NO: 562 - DNA, 25 bp, synthetic construct
  misc_feature 1..25: note = Oligonucleotide
  source 1..25: mol_type = other DNA
agtgttacatcttgagggatcacaa

SEQ ID NO: 563 - DNA, 25 bp, synthetic construct
  misc_feature 1..25: note = Oligonucleotide
  source 1..25: mol_type = other DNA
ccaagtgttacatcttgagggatca

SEQ ID NO: 564 - DNA, 25 bp, synthetic construct
  misc_feature 1..25: note = Oligonucleotide
  source 1..25: mol_type = other DNA
ataccaagtgttacatcttgaggga

SEQ ID NO: 565 - DNA, 25 bp, synthetic construct
  misc_feature 1..25: note = Oligonucleotide
  source 1..25: mol_type = other DNA
agcataccaagtgttacatcttgag

SEQ ID NO: 566 - DNA, 25 bp, synthetic construct
  misc_feature 1..25: note = Oligonucleotide
  source 1..25: mol_type = other DNA
ccgagcataccaagtgttacatctt

SEQ ID NO: 567 - DNA, 25 bp, synthetic construct
  misc_feature 1..25: note = Oligonucleotide
  source 1..25: mol_type = other DNA
caaccgagcataccaagtgttacat

SEQ ID NO: 568 - DNA, 25 bp, synthetic construct
  misc_feature 1..25: note = Oligonucleotide
  source 1..25: mol_type = other DNA
cctcaaccgagcataccaagtgtta

SEQ ID NO: 569 - DNA, 25 bp, synthetic construct
  misc_feature 1..25: note = Oligonucleotide
  source 1..25: mol_type = other DNA
tatcctcaaccgagcataccaagtg

SEQ ID NO: 570 - DNA, 25 bp, synthetic construct
  misc_feature 1..25: note = Oligonucleotide
  source 1..25: mol_type = other DNA
tcatatcctcaaccgagcataccaa

SEQ ID NO: 571 - DNA, 25 bp, synthetic construct
  misc_feature 1..25: note = Oligonucleotide
  source 1..25: mol_type = other DNA
ttttcatatcctcaaccgagcatac

SEQ ID NO: 572 - DNA, 25 bp, synthetic construct
  misc_feature 1..25: note = Oligonucleotide
  source 1..25: mol_type = other DNA
attttttcatatcctcaaccgagca

SEQ ID NO: 573 - DNA, 25 bp, synthetic construct
  misc_feature 1..25: note = Oligonucleotide
  source 1..25: mol_type = other DNA
agtattttttcatatcctcaaccga

SEQ ID NO: 574 - DNA, 25 bp, synthetic construct
  misc_feature 1..25: note = Oligonucleotide
  source 1..25: mol_type = other DNA
ggaagtattttttcatatcctcaac

SEQ ID NO: 575 - DNA, 25 bp, synthetic construct
  misc_feature 1..25: note = Oligonucleotide
  source 1..25: mol_type = other DNA
ttcggaagtattttttcatatcctc

SEQ ID NO: 576 - DNA, 25 bp, synthetic construct
  misc_feature 1..25: note = Oligonucleotide
  source 1..25: mol_type = other DNA
ggtttcggaagtattttttcatatc

SEQ ID NO: 577 - DNA, 25 bp, synthetic construct
  misc_feature 1..25: note = Oligonucleotide
  source 1..25: mol_type = other DNA
cctggtttcggaagtattttttcat

SEQ ID NO: 578 - DNA, 25 bp, synthetic construct
  misc_feature 1..25: note = Oligonucleotide
  source 1..25: mol_type = other DNA
attcctggtttcggaagtatttttt

SEQ ID NO: 579 - DNA, 25 bp, synthetic construct
  misc_feature 1..25: note = Oligonucleotide
  source 1..25: mol_type = other DNA
tgaattcctggtttcggaagtattt

SEQ ID NO: 580 - DNA, 25 bp, synthetic construct
  misc_feature 1..25: note = Oligonucleotide
  source 1..25: mol_type = other DNA
cattgaattcctggtttcggaagta

SEQ ID NO: 581 - DNA, 25 bp, synthetic construct
  misc_feature 1..25: note = Oligonucleotide
  source 1..25: mol_type = other DNA
atacattgaattcctggtttcggaa

SEQ ID NO: 582 - DNA, 25 bp, synthetic construct
  misc_feature 1..25: note = Oligonucleotide
  source 1..25: mol_type = other DNA
aacatacattgaattcctggtttcg

SEQ ID NO: 583 - DNA, 25 bp, synthetic construct
  misc_feature 1..25: note = Oligonucleotide
  source 1..25: mol_type = other DNA
acaaacatacattgaattcctggtt

SEQ ID NO: 584 - DNA, 25 bp, synthetic construct
  misc_feature 1..25: note = Oligonucleotide
  source 1..25: mol_type = other DNA
aaaacaaacatacattgaattcctg

SEQ ID NO: 585 - DNA, 25 bp, synthetic construct
  misc_feature 1..25: note = Oligonucleotide
  source 1..25: mol_type = other DNA
tataaaacaaacatacattgaattc

SEQ ID NO: 586 - DNA, 25 bp, synthetic construct
  misc_feature 1..25: note = Oligonucleotide
  source 1..25: mol_type = other DNA
cagtataaaacaaacatacattgaa

SEQ ID NO: 587 - DNA, 25 bp, synthetic construct
  misc_feature 1..25: note = Oligonucleotide
  source 1..25: mol_type = other DNA
aaacagtataaaacaaacatacatt

SEQ ID NO: 588 - DNA, 25 bp, synthetic construct
  misc_feature 1..25: note = Oligonucleotide
  source 1..25: mol_type = other DNA
atcaaacagtataaaacaaacatac

SEQ ID NO: 589 - DNA, 25 bp, synthetic construct
  misc_feature 1..25: note = Oligonucleotide
  source 1..25: mol_type = other DNA
cttatcaaacagtataaaacaaaca

SEQ ID NO: 590 - DNA, 25 bp, synthetic construct
  misc_feature 1..25: note = Oligonucleotide
  source 1..25: mol_type = other DNA
tttcttatcaaacagtataaaacaa

SEQ ID NO: 591 - DNA, 25 bp, synthetic construct
  misc_feature 1..25: note = Oligonucleotide
  source 1..25: mol_type = other DNA
acttttcttatcaaacagtataaaa

SEQ ID NO: 592 - DNA, 25 bp, synthetic construct
  misc_feature 1..25: note = Oligonucleotide
  source 1..25: mol_type = other DNA
cctacttttcttatcaaacagtata

SEQ ID NO: 593 - DNA, 25 bp, synthetic construct
  misc_feature 1..25: note = Oligonucleotide
  source 1..25: mol_type = other DNA
ggacctacttttcttatcaaacagt

SEQ ID NO: 594 - DNA, 25 bp, synthetic construct
  misc_feature 1..25: note = Oligonucleotide
  source 1..25: mol_type = other DNA
gctggacctacttttcttatcaaac

SEQ ID NO: 595 - DNA, 25 bp, synthetic construct
  misc_feature 1..25: note = Oligonucleotide
  source 1..25: mol_type = other DNA
aaggctggacctacttttcttatca

SEQ ID NO: 596 - DNA, 25 bp, synthetic construct
  misc_feature 1..25: note = Oligonucleotide
  source 1..25: mol_type = other DNA
cttaaggctggacctacttttctta

SEQ ID NO: 597 - DNA, 25 bp, synthetic construct
  misc_feature 1..25: note = Oligonucleotide
  source 1..25: mol_type = other DNA
ctgcttaaggctggacctacttttc

SEQ ID NO: 598 - DNA, 25 bp, synthetic construct
  misc_feature 1..25: note = Oligonucleotide
  source 1..25: mol_type = other DNA
gtgctgcttaaggctggacctactt

SEQ ID NO: 599 - DNA, 25 bp, synthetic construct
  misc_feature 1..25: note = Oligonucleotide
  source 1..25: mol_type = other DNA
tctgtgctgcttaaggctggaccta

SEQ ID NO: 600 - DNA, 25 bp, synthetic construct
  misc_feature 1..25: note = Oligonucleotide
  source 1..25: mol_type = other DNA
gcatctgtgctgcttaaggctggac

SEQ ID NO: 601 - DNA, 25 bp, synthetic construct
  misc_feature 1..25: note = Oligonucleotide
  source 1..25: mol_type = other DNA
agcgcatctgtgctgcttaaggctg

SEQ ID NO: 602 - DNA, 25 bp, synthetic construct
  misc_feature 1..25: note = Oligonucleotide
  source 1..25: mol_type = other DNA
accagcgcatctgtgctgcttaagg

SEQ ID NO: 603 - DNA, 25 bp, synthetic construct
  misc_feature 1..25: note = Oligonucleotide
  source 1..25: mol_type = other DNA
tctaccagcgcatctgtgctgctta

SEQ ID NO: 604 - DNA, 25 bp, synthetic construct
  misc_feature 1..25: note = Oligonucleotide
  source 1..25: mol_type = other DNA
gcatctaccagcgcatctgtgctgc

SEQ ID NO: 605 - DNA, 25 bp, synthetic construct
  misc_feature 1..25: note = Oligonucleotide
  source 1..25: mol_type = other DNA
tatgcatctaccagcgcatctgtgc

SEQ ID NO: 606 - DNA, 25 bp, synthetic construct
  misc_feature 1..25: note = Oligonucleotide
  source 1..25: mol_type = other DNA
gactatgcatctaccagcgcatctg

SEQ ID NO: 607 - DNA, 25 bp, synthetic construct
  misc_feature 1..25: note = Oligonucleotide
  source 1..25: mol_type = other DNA
cctgactatgcatctaccagcgcat

SEQ ID NO: 608 - DNA, 25 bp, synthetic construct
  misc_feature 1..25: note = Oligonucleotide
  source 1..25: mol_type = other DNA
gttcctgactatgcatctaccagcg

SEQ ID NO: 609 - DNA, 25 bp, synthetic construct
  misc_feature 1..25: note = Oligonucleotide
  source 1..25: mol_type = other DNA
aaagttcctgactatgcatctacca

SEQ ID NO: 610 - DNA, 25 bp, synthetic construct
  misc_feature 1..25: note = Oligonucleotide
  source 1..25: mol_type = other DNA
aaaaaagttcctgactatgcatcta

SEQ ID NO: 611 - DNA, 25 bp, synthetic construct
  misc_feature 1..25: note = Oligonucleotide
  source 1..25: mol_type = other DNA
ataaaaaaagttcctgactatgcat

SEQ ID NO: 612 - DNA, 25 bp, synthetic construct
  misc_feature 1..25: note = Oligonucleotide
  source 1..25: mol_type = other DNA
gaaataaaaaaagttcctgactatg

SEQ ID NO: 613 - DNA, 25 bp, synthetic construct
  misc_feature 1..25: note = Oligonucleotide
  source 1..25: mol_type = other DNA
aaagaaataaaaaaagttcctgact

SEQ ID NO: 614 - DNA, 25 bp, synthetic construct
  misc_feature 1..25: note = Oligonucleotide
  source 1..25: mol_type = other DNA
ctaaaagaaataaaaaaagttcctg

SEQ ID NO: 615 - DNA, 25 bp, synthetic construct
  misc_feature 1..25: note = Oligonucleotide
  source 1..25: mol_type = other DNA
gacctaaaagaaataaaaaaagttc

SEQ ID NO: 616 - DNA, 25 bp, synthetic construct
  misc_feature 1..25: note = Oligonucleotide
  source 1..25: mol_type = other DNA
ctagacctaaaagaaataaaaaaag

SEQ ID NO: 617 - DNA, 25 bp, synthetic construct
  misc_feature 1..25: note = Oligonucleotide
  source 1..25: mol_type = other DNA
tccctagacctaaaagaaataaaaa

SEQ ID NO: 618 - DNA, 25 bp, synthetic construct
  misc_feature 1..25: note = Oligonucleotide
  source 1..25: mol_type = other DNA
ctgtccctagacctaaaagaaataa

SEQ ID NO: 619 - DNA, 25 bp, synthetic construct
  misc_feature 1..25: note = Oligonucleotide
  source 1..25: mol_type = other DNA
ctcctgtccctagacctaaaagaaa

SEQ ID NO: 620 - DNA, 25 bp, synthetic construct
  misc_feature 1..25: note = Oligonucleotide
  source 1..25: mol_type = other DNA
tcactcctgtccctagacctaaaag

SEQ ID NO: 621 - DNA, 25 bp, synthetic construct
  misc_feature 1..25: note = Oligonucleotide
  source 1..25: mol_type = other DNA
tattcactcctgtccctagacctaa

SEQ ID NO: 622 - DNA, 25 bp, synthetic construct
  misc_feature 1..25: note = Oligonucleotide
  source 1..25: mol_type = other DNA
ttctattcactcctgtccctagacc

SEQ ID NO: 623 - DNA, 25 bp, synthetic construct
  misc_feature 1..25: note = Oligonucleotide
  source 1..25: mol_type = other DNA
cctttctattcactcctgtccctag

SEQ ID NO: 624 - DNA, 25 bp, synthetic construct
  misc_feature 1..25: note = Oligonucleotide
  source 1..25: mol_type = other DNA
ctccctttctattcactcctgtccc

SEQ ID NO: 625 - DNA, 25 bp, synthetic construct
  misc_feature 1..25: note = Oligonucleotide
  source 1..25: mol_type = other DNA
ctcctccctttctattcactcctgt

SEQ ID NO: 626 - DNA, 25 bp, synthetic construct
  misc_feature 1..25: note = Oligonucleotide
  source 1..25: mol_type = other DNA
gctctcctccctttctattcactcc

SEQ ID NO: 627 - DNA, 25 bp, synthetic construct
  misc_feature 1..25: note = Oligonucleotide
  source 1..25: mol_type = other DNA
agagctctcctccctttctattcac

SEQ ID NO: 628 - DNA, 25 bp, synthetic construct
  misc_feature 1..25: note = Oligonucleotide
  source 1..25: mol_type = other DNA
aatagagctctcctccctttctatt

SEQ ID NO: 629 - DNA, 25 bp, synthetic construct
  misc_feature 1..25: note = Oligonucleotide
  source 1..25: mol_type = other DNA
cataatagagctctcctccctttct

SEQ ID NO: 630 - DNA, 25 bp, synthetic construct
  misc_feature 1..25: note = Oligonucleotide
  source 1..25: mol_type = other DNA
gaacataatagagctctcctccctt

SEQ ID NO: 631 - DNA, 25 bp, synthetic construct
  misc_feature 1..25: note = Oligonucleotide
  source 1..25: mol_type = other DNA
atagaacataatagagctctcctcc

SEQ ID NO: 632 - DNA, 25 bp, synthetic construct
  misc_feature 1..25: note = Oligonucleotide
  source 1..25: mol_type = other DNA
tgtatagaacataatagagctctcc

SEQ ID NO: 633 - DNA, 25 bp, synthetic construct
  misc_feature 1..25: note = Oligonucleotide
  source 1..25: mol_type = other DNA
ctgtgtatagaacataatagagctc

SEQ ID NO: 634 - DNA, 25 bp, synthetic construct
  misc_feature 1..25: note = Oligonucleotide
  source 1..25: mol_type = other DNA
aatctgtgtatagaacataatagag

SEQ ID NO: 635 - DNA, 25 bp, synthetic construct
  misc_feature 1..25: note = Oligonucleotide
  source 1..25: mol_type = other DNA
cctaatctgtgtatagaacataata

SEQ ID NO: 636 - DNA, 25 bp, synthetic construct
  misc_feature 1..25: note = Oligonucleotide
  source 1..25: mol_type = other DNA
tctcctaatctgtgtatagaacata

SEQ ID NO: 637 - DNA, 25 bp, synthetic construct
  misc_feature 1..25: note = Oligonucleotide
  source 1..25: mol_type = other DNA
tcatctcctaatctgtgtatagaac

SEQ ID NO: 638 - DNA, 25 bp, synthetic construct
  misc_feature 1..25: note = Oligonucleotide
  source 1..25: mol_type = other DNA
aggtcatctcctaatctgtgtatag

SEQ ID NO: 639 - DNA, 25 bp, synthetic construct
  misc_feature 1..25: note = Oligonucleotide
  source 1..25: mol_type = other DNA
gtaaggtcatctcctaatctgtgta

SEQ ID NO: 640 - DNA, 25 bp, synthetic construct
  misc_feature 1..25: note = Oligonucleotide
  source 1..25: mol_type = other DNA
ccagtaaggtcatctcctaatctgt

SEQ ID NO: 641 - DNA, 25 bp, synthetic construct
  misc_feature 1..25: note = Oligonucleotide
  source 1..25: mol_type = other DNA
tacccagtaaggtcatctcctaatc

SEQ ID NO: 642 - DNA, 25 bp, synthetic construct
  misc_feature 1..25: note = Oligonucleotide
  source 1..25: mol_type = other DNA
gtgtacccagtaaggtcatctccta

SEQ ID NO: 643 - DNA, 25 bp, synthetic construct
  misc_feature 1..25: note = Oligonucleotide
  source 1..25: mol_type = other DNA
ggggtgtacccagtaaggtcatctc

SEQ ID NO: 644 - DNA, 25 bp, synthetic construct
  misc_feature 1..25: note = Oligonucleotide
  source 1..25: mol_type = other DNA
agaggggtgtacccagtaaggtcat

SEQ ID NO: 645 - DNA, 25 bp, synthetic construct
  misc_feature 1..25: note = Oligonucleotide
  source 1..25: mol_type = other DNA
gttagaggggtgtacccagtaaggt

SEQ ID NO: 646 - DNA, 25 bp, synthetic construct
  misc_feature 1..25: note = Oligonucleotide
  source 1..25: mol_type = other DNA
ctggttagaggggtgtacccagtaa

SEQ ID NO: 647 - DNA, 25 bp, synthetic construct
  misc_feature 1..25: note = Oligonucleotide
  source 1..25: mol_type = other DNA
gcactggttagaggggtgtacccag

SEQ ID NO: 648 - DNA, 25 bp, synthetic construct
  misc_feature 1..25: note = Oligonucleotide
  source 1..25: mol_type = other DNA
taagcactggttagaggggtgtacc

SEQ ID NO: 649 - DNA, 25 bp, synthetic construct
  misc_feature 1..25: note = Oligonucleotide
  source 1..25: mol_type = other DNA
ctgtaagcactggttagaggggtgt

SEQ ID NO: 650 - DNA, 25 bp, synthetic construct
  misc_feature 1..25: note = Oligonucleotide
  source 1..25: mol_type = other DNA
aacctgtaagcactggttagagggg

SEQ ID NO: 651 - DNA, 25 bp, synthetic construct
  misc_feature 1..25: note = Oligonucleotide
  source 1..25: mol_type = other DNA
attaacctgtaagcactggttagag

SEQ ID NO: 652 - DNA, 25 bp, synthetic construct
  misc_feature 1..25: note = Oligonucleotide
  source 1..25: mol_type = other DNA
tgcattaacctgtaagcactggtta

SEQ ID NO: 653 - DNA, 25 bp, synthetic construct
  misc_feature 1..25: note = Oligonucleotide
  source 1..25: mol_type = other DNA
acatgcattaacctgtaagcactgg

SEQ ID NO: 654 - DNA, 25 bp, synthetic construct
  misc_feature 1..25: note = Oligonucleotide
  source 1..25: mol_type = other DNA
ttaacatgcattaacctgtaagcac

SEQ ID NO: 655 - DNA, 25 bp, synthetic construct
  misc_feature 1..25: note = Oligonucleotide
  source 1..25: mol_type = other DNA
tcattaacatgcattaacctgtaag

SEQ ID NO: 656 - DNA, 25 bp, synthetic construct
  misc_feature 1..25: note = Oligonucleotide
  source 1..25: mol_type = other DNA
tattcattaacatgcattaacctgt

SEQ ID NO: 657 - DNA, 25 bp, synthetic construct
  misc_feature 1..25: note = Oligonucleotide
  source 1..25: mol_type = other DNA
aaatattcattaacatgcattaacc

SEQ ID NO: 658 - DNA, 25 bp, synthetic construct
  misc_feature 1..25: note = Oligonucleotide
  source 1..25: mol_type = other DNA
caaaaatattcattaacatgcatta

SEQ ID NO: 659 - DNA, 25 bp, synthetic construct
  misc_feature 1..25: note = Oligonucleotide
  source 1..25: mol_type = other DNA
ctgcaaaaatattcattaacatgca

SEQ ID NO: 660 - DNA, 25 bp, synthetic construct
  misc_feature 1..25: note = Oligonucleotide
  source 1..25: mol_type = other DNA
caactgcaaaaatattcattaacat

SEQ ID NO: 661 - DNA, 25 bp, synthetic construct
  misc_feature 1..25: note = Oligonucleotide
  source 1..25: mol_type = other DNA
ttacaactgcaaaaatattcattaa

SEQ ID NO: 662 - DNA, 25 bp, synthetic construct
  misc_feature 1..25: note = Oligonucleotide
  source 1..25: mol_type = other DNA
gctttacaactgcaaaaatattcat

SEQ ID NO: 663 - DNA, 25 bp, synthetic construct
  misc_feature 1..25: note = Oligonucleotide
  source 1..25: mol_type = other DNA
tatgctttacaactgcaaaaatatt

SEQ ID NO: 664 - DNA, 25 bp, synthetic construct
  misc_feature 1..25: note = Oligonucleotide
  source 1..25: mol_type = other DNA
tgttatgctttacaactgcaaaaat

SEQ ID NO: 665 - DNA, 25 bp, synthetic construct
  misc_feature 1..25: note = Oligonucleotide
  source 1..25: mol_type = other DNA
aattgttatgctttacaactgcaaa

SEQ ID NO: 666 - DNA, 25 bp, synthetic construct
  misc_feature 1..25: note = Oligonucleotide
  source 1..25: mol_type = other DNA
tgtaattgttatgctttacaactgc

SEQ ID NO: 667 - DNA, 25 bp, synthetic construct
  misc_feature 1..25: note = Oligonucleotide
  source 1..25: mol_type = other DNA
agttgtaattgttatgctttacaac

SEQ ID NO: 668 - DNA, 25 bp, synthetic construct
  misc_feature 1..25: note = Oligonucleotide
  source 1..25: mol_type = other DNA
tgtagttgtaattgttatgctttac

SEQ ID NO: 669 - DNA, 25 bp, synthetic construct
  misc_feature 1..25: note = Oligonucleotide
  source 1..25: mol_type = other DNA
atgtgtagttgtaattgttatgctt

SEQ ID NO: 670 - DNA, 25 bp, synthetic construct
  misc_feature 1..25: note = Oligonucleotide
  source 1..25: mol_type = other DNA
tagatgtgtagttgtaattgttatg

SEQ ID NO: 671 - DNA, 25 bp, synthetic construct
  misc_feature 1..25: note = Oligonucleotide
  source 1..25: mol_type = other DNA
aaatagatgtgtagttgtaattgtt

SEQ ID NO: 672 - DNA, 25 bp, synthetic construct
  misc_feature 1..25: note = Oligonucleotide
  source 1..25: mol_type = other DNA
tagaaatagatgtgtagttgtaatt

SEQ ID NO: 673 - DNA, 25 bp, synthetic construct
  misc_feature 1..25: note = Oligonucleotide
  source 1..25: mol_type = other DNA
ctttagaaatagatgtgtagttgta

SEQ ID NO: 674 - DNA, 25 bp, synthetic construct
  misc_feature 1..25: note = Oligonucleotide
  source 1..25: mol_type = other DNA
attctttagaaatagatgtgtagtt

SEQ ID NO: 675 - DNA, 25 bp, synthetic construct
  misc_feature 1..25: note = Oligonucleotide
  source 1..25: mol_type = other DNA
tttattctttagaaatagatgtgta

SEQ ID NO: 676 - DNA, 25 bp, synthetic construct
  misc_feature 1..25: note = Oligonucleotide
  source 1..25: mol_type = other DNA
tgttttattctttagaaatagatgt

SEQ ID NO: 677 - DNA, 25 bp, synthetic construct
  misc_feature 1..25: note = Oligonucleotide
  source 1..25: mol_type = other DNA
tcctgttttattctttagaaataga

SEQ ID NO: 678 - DNA, 25 bp, synthetic construct
  misc_feature 1..25: note = Oligonucleotide
  source 1..25: mol_type = other DNA
tggtcctgttttattctttagaaat

SEQ ID NO: 679 - DNA, 25 bp, synthetic construct
  misc_feature 1..25: note = Oligonucleotide
  source 1..25: mol_type = other DNA
atatggtcctgttttattctttaga

SEQ ID NO: 680 - DNA, 25 bp, synthetic construct
  misc_feature 1..25: note = Oligonucleotide
  source 1..25: mol_type = other DNA
taaatatggtcctgttttattcttt

SEQ ID NO: 681 - DNA, 25 bp, synthetic construct
  misc_feature 1..25: note = Oligonucleotide
  source 1..25: mol_type = other DNA
aaataaatatggtcctgttttattc

SEQ ID NO: 682 - DNA, 25 bp, synthetic construct
  misc_feature 1..25: note = Oligonucleotide
  source 1..25: mol_type = other DNA
agtaaataaatatggtcctgtttta

SEQ ID NO: 683 - DNA, 25 bp, synthetic construct
  misc_feature 1..25: note = Oligonucleotide
  source 1..25: mol_type = other DNA
agaagtaaataaatatggtcctgtt

SEQ ID NO: 684 - DNA, 25 bp, synthetic construct
  misc_feature 1..25: note = Oligonucleotide
  source 1..25: mol_type = other DNA
gacagaagtaaataaatatggtcct

SEQ ID NO: 685 - DNA, 25 bp, synthetic construct
  misc_feature 1..25: note = Oligonucleotide
  source 1..25: mol_type = other DNA
gttgacagaagtaaataaatatggt

SEQ ID NO: 686 - DNA, 25 bp, synthetic construct
  misc_feature 1..25: note = Oligonucleotide
  source 1..25: mol_type = other DNA
atagttgacagaagtaaataaatat

SEQ ID NO: 687 - DNA, 25 bp, synthetic construct
  misc_feature 1..25: note = Oligonucleotide
  source 1..25: mol_type = other DNA
tctatagttgacagaagtaaataaa

SEQ ID NO: 688 - DNA, 25 bp, synthetic construct
  misc_feature 1..25: note = Oligonucleotide
  source 1..25: mol_type = other DNA
ctttctatagttgacagaagtaaat

SEQ ID NO: 689 - DNA, 25 bp, synthetic construct
  misc_feature 1..25: note = Oligonucleotide
  source 1..25: mol_type = other DNA
tttctttctatagttgacagaagta

SEQ ID NO: 690 - DNA, 25 bp, synthetic construct
  misc_feature 1..25: note = Oligonucleotide
  source 1..25: mol_type = other DNA
gtctttctttctatagttgacagaa

SEQ ID NO: 691 - DNA, 25 bp, synthetic construct
  misc_feature 1..25: note = Oligonucleotide
  source 1..25: mol_type = other DNA
aaggtctttctttctatagttgaca

SEQ ID NO: 692 - DNA, 25 bp, synthetic construct
  misc_feature 1..25: note = Oligonucleotide
  source 1..25: mol_type = other DNA
ctgaaggtctttctttctatagttg

SEQ ID NO: 693 - DNA, 25 bp, synthetic construct
  misc_feature 1..25: note = Oligonucleotide
  source 1..25: mol_type = other DNA
cagctgaaggtctttctttctatag

SEQ ID NO: 694 - DNA, 25 bp, synthetic construct
  misc_feature 1..25: note = Oligonucleotide
  source 1..25: mol_type = other DNA
atacagctgaaggtctttctttcta

SEQ ID NO: 695 - DNA, 25 bp, synthetic construct
  misc_feature 1..25: note = Oligonucleotide
  source 1..25: mol_type = other DNA
gaaatacagctgaaggtctttcttt

SEQ ID NO: 696 - DNA, 25 bp, synthetic construct
  misc_feature 1..25: note = Oligonucleotide
  source 1..25: mol_type = other DNA
gtggaaatacagctgaaggtctttc

SEQ ID NO: 697 - DNA, 25 bp, synthetic construct
  misc_feature 1..25: note = Oligonucleotide
  source 1..25: mol_type = other DNA
tctgtggaaatacagctgaaggtct

SEQ ID NO: 698 - DNA, 25 bp, synthetic construct
  misc_feature 1..25: note = Oligonucleotide
  source 1..25: mol_type = other DNA
aaatctgtggaaatacagctgaagg

SEQ ID NO: 699 - DNA, 25 bp, synthetic construct
  misc_feature 1..25: note = Oligonucleotide
  source 1..25: mol_type = other DNA
gagaaatctgtggaaatacagctga

SEQ ID NO: 700 - DNA, 25 bp, synthetic construct
  misc_feature 1..25: note = Oligonucleotide
  source 1..25: mol_type = other DNA
tgggagaaatctgtggaaatacagc

SEQ ID NO: 701 - DNA, 25 bp, synthetic construct
  misc_feature 1..25: note = Oligonucleotide
  source 1..25: mol_type = other DNA
ccttgggagaaatctgtggaaatac

SEQ ID NO: 702 - DNA, 25 bp, synthetic construct
  misc_feature 1..25: note = Oligonucleotide
  source 1..25: mol_type = other DNA
tttccttgggagaaatctgtggaaa

SEQ ID NO: 703 - DNA, 25 bp, synthetic construct
  misc_feature 1..25: note = Oligonucleotide
  source 1..25: mol_type = other DNA
ccttttccttgggagaaatctgtgg

SEQ ID NO: 704 - DNA, 25 bp, synthetic construct
  misc_feature 1..25: note = Oligonucleotide
  source 1..25: mol_type = other DNA
tagccttttccttgggagaaatctg

SEQ ID NO: 705 - DNA, 25 bp, synthetic construct
  misc_feature 1..25: note = Oligonucleotide
  source 1..25: mol_type = other DNA
tattagccttttccttgggagaaat

SEQ ID NO: 706 - DNA, 25 bp, synthetic construct
  misc_feature 1..25: note = Oligonucleotide
  source 1..25: mol_type = other DNA
taatattagccttttccttgggaga

SEQ ID NO: 707 - DNA, 25 bp, synthetic construct
  misc_feature 1..25: note = Oligonucleotide
  source 1..25: mol_type = other DNA
gactaatattagccttttccttggg

SEQ ID NO: 708 - DNA, 25 bp, synthetic construct
  misc_feature 1..25: note = Oligonucleotide
  source 1..25: mol_type = other DNA
agtgactaatattagccttttcctt

SEQ ID NO: 709 - DNA, 25 bp, synthetic construct
  misc_feature 1..25: note = Oligonucleotide
  source 1..25: mol_type = other DNA
agtagtgactaatattagccttttc

SEQ ID NO: 710 - DNA, 25 bp, synthetic construct
  misc_feature 1..25: note = Oligonucleotide
  source 1..25: mol_type = other DNA
aacagtagtgactaatattagcctt

SEQ ID NO: 711 - DNA, 25 bp, synthetic construct
  misc_feature 1..25: note = Oligonucleotide
  source 1..25: mol_type = other DNA
gataacagtagtgactaatattagc

SEQ ID NO: 712 - DNA, 25 bp, synthetic construct
  misc_feature 1..25: note = Oligonucleotide
  source 1..25: mol_type = other DNA
tgtgataacagtagtgactaatatt

SEQ ID NO: 713 - DNA, 25 bp, synthetic construct
  misc_feature 1..25: note = Oligonucleotide
  source 1..25: mol_type = other DNA
ggatgtgataacagtagtgactaat

SEQ ID NO: 714 - DNA, 25 bp, synthetic construct
  misc_feature 1..25: note = Oligonucleotide
  source 1..25: mol_type = other DNA
aagggatgtgataacagtagtgact

SEQ ID NO: 715 - DNA, 25 bp, synthetic construct
  misc_feature 1..25: note = Oligonucleotide
  source 1..25: mol_type = other DNA
acaaagggatgtgataacagtagtg

SEQ ID NO: 716 - DNA, 25 bp, synthetic construct
  misc_feature 1..25: note = Oligonucleotide
  source 1..25: mol_type = other DNA
tatacaaagggatgtgataacagta

SEQ ID NO: 717 - DNA, 25 bp, synthetic construct
  misc_feature 1..25: note = Oligonucleotide
  source 1..25: mol_type = other DNA
acttatacaaagggatgtgataaca

SEQ ID NO: 718 - DNA, 25 bp, synthetic construct
  misc_feature 1..25: note = Oligonucleotide
  source 1..25: mol_type = other DNA
aaaacttatacaaagggatgtgata

SEQ ID NO: 719 - DNA, 25 bp, synthetic construct
  misc_feature 1..25: note = Oligonucleotide
  source 1..25: mol_type = other DNA
tttaaaacttatacaaagggatgtg

SEQ ID NO: 720 - DNA, 25 bp, synthetic construct
  misc_feature 1..25: note = Oligonucleotide
  source 1..25: mol_type = other DNA
ctttttaaaacttatacaaagggat

SEQ ID NO: 721 - DNA, 25 bp, synthetic construct
  misc_feature 1..25: note = Oligonucleotide
  source 1..25: mol_type = other DNA
tctctttttaaaacttatacaaagg

SEQ ID NO: 722 - DNA, 25 bp, synthetic construct
  misc_feature 1..25: note = Oligonucleotide
  source 1..25: mol_type = other DNA
ccatctctttttaaaacttatacaa

SEQ ID NO: 723 - DNA, 25 bp, synthetic construct
  misc_feature 1..25: note = Oligonucleotide
  source 1..25: mol_type = other DNA
cctccatctctttttaaaacttata

SEQ ID NO: 724 - DNA, 25 bp, synthetic construct
  misc_feature 1..25: note = Oligonucleotide
  source 1..25: mol_type = other DNA
ctccctccatctctttttaaaactt

SEQ ID NO: 725 - DNA, 25 bp, synthetic construct
  misc_feature 1..25: note = Oligonucleotide
  source 1..25: mol_type = other DNA
gatctccctccatctctttttaaaa

SEQ ID NO: 726 - DNA, 25 bp, synthetic construct
  misc_feature 1..25: note = Oligonucleotide
  source 1..25: mol_type = other DNA
gaagatctccctccatctcttttta

SEQ ID NO: 727 - DNA, 25 bp, synthetic construct
  misc_feature 1..25: note = Oligonucleotide
  source 1..25: mol_type = other DNA
aatgaagatctccctccatctcttt

SEQ ID NO: 728 - DNA, 25 bp, synthetic construct
  misc_feature 1..25: note = Oligonucleotide
  source 1..25: mol_type = other DNA
agaaatgaagatctccctccatctc

SEQ ID NO: 729 - DNA, 25 bp, synthetic construct
  misc_feature 1..25: note = Oligonucleotide
  source 1..25: mol_type = other DNA
caaagaaatgaagatctccctccat

SEQ ID NO: 730 - DNA, 25 bp, synthetic construct
  misc_feature 1..25: note = Oligonucleotide
  source 1..25: mol_type = other DNA
cctcaaagaaatgaagatctccctc

SEQ ID NO: 731 - DNA, 25 bp, synthetic construct
  misc_feature 1..25: note = Oligonucleotide
  source 1..25: mol_type = other DNA
tctcctcaaagaaatgaagatctcc

SEQ ID NO: 732 - DNA, 25 bp, synthetic construct
  misc_feature 1..25: note = Oligonucleotide
  source 1..25: mol_type = other DNA
tgatctcctcaaagaaatgaagatc

SEQ ID NO: 733 - DNA, 25 bp, synthetic construct
  misc_feature 1..25: note = Oligonucleotide
  source 1..25: mol_type = other DNA
tactgatctcctcaaagaaatgaag

SEQ ID NO: 734 - DNA, 25 bp, synthetic construct
  misc_feature 1..25: note = Oligonucleotide
  source 1..25: mol_type = other DNA
caatactgatctcctcaaagaaatg

SEQ ID NO: 735 - DNA, 25 bp, synthetic construct
  misc_feature 1..25: note = Oligonucleotide
  source 1..25: mol_type = other DNA
ttacaatactgatctcctcaaagaa

SEQ ID NO: 736 - DNA, 25 bp, synthetic construct
  misc_feature 1..25: note = Oligonucleotide
  source 1..25: mol_type = other DNA
acgttacaatactgatctcctcaaa

SEQ ID NO: 737 - DNA, 25 bp, synthetic construct
  misc_feature 1..25: note = Oligonucleotide
  source 1..25: mol_type = other DNA
catacgttacaatactgatctcctc

SEQ ID NO: 738 - DNA, 25 bp, synthetic construct
  misc_feature 1..25: note = Oligonucleotide
  source 1..25: mol_type = other DNA
tcacatacgttacaatactgatctc

SEQ ID NO: 739 - DNA, 25 bp, synthetic construct
  misc_feature 1..25: note = Oligonucleotide
  source 1..25: mol_type = other DNA
tattcacatacgttacaatactgat

SEQ ID NO: 740 - DNA, 25 bp, synthetic construct
  misc_feature 1..25: note = Oligonucleotide
  source 1..25: mol_type = other DNA
atctattcacatacgttacaatact

SEQ ID NO: 741 - DNA, 25 bp, synthetic construct
  misc_feature 1..25: note = Oligonucleotide
  source 1..25: mol_type = other DNA
atcatctattcacatacgttacaat

SEQ ID NO: 742 - DNA, 25 bp, synthetic construct
  misc_feature 1..25: note = Oligonucleotide
  source 1..25: mol_type = other DNA
gttatcatctattcacatacgttac

SEQ ID NO: 743 - DNA, 25 bp, synthetic construct
  misc_feature 1..25: note = Oligonucleotide
  source 1..25: mol_type = other DNA
attgttatcatctattcacatacgt

SEQ ID NO: 744 - DNA, 25 bp, synthetic construct
  misc_feature 1..25: note = Oligonucleotide
  source 1..25: mol_type = other DNA
ttaattgttatcatctattcacata

SEQ ID NO: 745 - DNA, 25 bp, synthetic construct
  misc_feature 1..25: note = Oligonucleotide
  source 1..25: mol_type = other DNA
atattaattgttatcatctattcac

SEQ ID NO: 746 - DNA, 25 bp, synthetic construct
  misc_feature 1..25: note = Oligonucleotide
  source 1..25: mol_type = other DNA
gtaatattaattgttatcatctatt

SEQ ID NO: 747 - DNA, 25 bp, synthetic construct
  misc_feature 1..25: note = Oligonucleotide
  source 1..25: mol_type = other DNA
ttagtaatattaattgttatcatct

SEQ ID NO: 748 - DNA, 25 bp, synthetic construct
  misc_feature 1..25: note = Oligonucleotide
  source 1..25: mol_type = other DNA
cttttagtaatattaattgttatca

SEQ ID NO: 749 - DNA, 25 bp, synthetic construct
  misc_feature 1..25: note = Oligonucleotide
  source 1..25: mol_type = other DNA
ggacttttagtaatattaattgtta

SEQ ID NO: 750 - DNA, 25 bp, synthetic construct
  misc_feature 1..25: note = Oligonucleotide
  source 1..25: mol_type = other DNA
gtgggacttttagtaatattaattg

SEQ ID NO: 751 - DNA, 25 bp, synthetic construct
  misc_feature 1..25: note = Oligonucleotide
  source 1..25: mol_type = other DNA
catgtgggacttttagtaatattaa

SEQ ID NO: 752 - DNA, 25 bp, synthetic construct
  misc_feature 1..25: note = Oligonucleotide
  source 1..25: mol_type = other DNA
tctcatgtgggacttttagtaatat

SEQ ID NO: 753 - DNA, 25 bp, synthetic construct
  misc_feature 1..25: note = Oligonucleotide
  source 1..25: mol_type = other DNA
gactctcatgtgggacttttagtaa

SEQ ID NO: 754 - DNA, 25 bp, synthetic construct
  misc_feature 1..25: note = Oligonucleotide
  source 1..25: mol_type = other DNA
caggactctcatgtgggacttttag

SEQ ID NO: 755 - DNA, 25 bp, synthetic construct
  misc_feature 1..25: note = Oligonucleotide
  source 1..25: mol_type = other DNA
cgtcaggactctcatgtgggacttt

SEQ ID NO: 756 - DNA, 25 bp, synthetic construct
  misc_feature 1..25: note = Oligonucleotide
  source 1..25: mol_type = other DNA
gggcgtcaggactctcatgtgggac

SEQ ID NO: 757 - DNA, 25 bp, synthetic construct
  misc_feature 1..25: note = Oligonucleotide
  source 1..25: mol_type = other DNA
agagggcgtcaggactctcatgtgg

SEQ ID NO: 758 - DNA, 25 bp, synthetic construct
  misc_feature 1..25: note = Oligonucleotide
  source 1..25: mol_type = other DNA
tggagagggcgtcaggactctcatg

SEQ ID NO: 759 - DNA, 25 bp, synthetic construct
  misc_feature 1..25: note = Oligonucleotide
  source 1..25: mol_type = other DNA
gcatggagagggcgtcaggactctc

SEQ ID NO: 760 - DNA, 25 bp, synthetic construct
  misc_feature 1..25: note = Oligonucleotide
  source 1..25: mol_type = other DNA
ggggcatggagagggcgtcaggact

SEQ ID NO: 761 - DNA, 25 bp, synthetic construct
  misc_feature 1..25: note = Oligonucleotide
  source 1..25: mol_type = other DNA
tgtggggcatggagagggcgtcagg

SEQ ID NO: 762 - DNA, 25 bp, synthetic construct
  misc_feature 1..25: note = Oligonucleotide
  source 1..25: mol_type = other DNA
tactgtggggcatggagagggcgtc

SEQ ID NO: 763 - DNA, 25 bp, synthetic construct
  misc_feature 1..25: note = Oligonucleotide
  source 1..25: mol_type = other DNA
cattactgtggggcatggagagggc

SEQ ID NO: 764 - DNA, 25 bp, synthetic construct
  misc_feature 1..25: note = Oligonucleotide
  source 1..25: mol_type = other DNA
ccacattactgtggggcatggagag

SEQ ID NO: 765 - DNA, 25 bp, synthetic construct
  misc_feature 1..25: note = Oligonucleotide
  source 1..25: mol_type = other DNA
aagccacattactgtggggcatgga

SEQ ID NO: 766 - DNA, 25 bp, synthetic construct
  misc_feature 1..25: note = Oligonucleotide
  source 1..25: mol_type = other DNA
aagaagccacattactgtggggcat

SEQ ID NO: 767 - DNA, 25 bp, synthetic construct
  misc_feature 1..25: note = Oligonucleotide
  source 1..25: mol_type = other DNA
tgaaagaagccacattactgtgggg

SEQ ID NO: 768 - DNA, 25 bp, synthetic construct
  misc_feature 1..25: note = Oligonucleotide
  source 1..25: mol_type = other DNA
ccatgaaagaagccacattactgtg

SEQ ID NO: 769 - DNA, 25 bp, synthetic construct
  misc_feature 1..25: note = Oligonucleotide
  source 1..25: mol_type = other DNA
aacccatgaaagaagccacattact

SEQ ID NO: 770 - DNA, 25 bp, synthetic construct
  misc_feature 1..25: note = Oligonucleotide
  source 1..25: mol_type = other DNA
aaaaacccatgaaagaagccacatt

SEQ ID NO: 771 - DNA, 25 bp, synthetic construct
  misc_feature 1..25: note = Oligonucleotide
  source 1..25: mol_type = other DNA
aaaaaaaacccatgaaagaagccac

SEQ ID NO: 772 - DNA, 25 bp, synthetic construct
  misc_feature 1..25: note = Oligonucleotide
  source 1..25: mol_type = other DNA
agaaaaaaaaacccatgaaagaagc

SEQ ID NO: 773 - DNA, 25 bp, synthetic construct
  misc_feature 1..25: note = Oligonucleotide
  source 1..25: mol_type = other DNA
agaagaaaaaaaaacccatgaaaga

SEQ ID NO: 774 - DNA, 25 bp, synthetic construct
  misc_feature 1..25: note = Oligonucleotide
  source 1..25: mol_type = other DNA
aaaagaagaaaaaaaaacccatgaa

SEQ ID NO: 775 - DNA, 25 bp, synthetic construct
  misc_feature 1..25: note = Oligonucleotide
  source 1..25: mol_type = other DNA
ctaaaaagaagaaaaaaaaacccat

SEQ ID NO: 776 - DNA, 25 bp, synthetic construct
  misc_feature 1..25: note = Oligonucleotide
  source 1..25: mol_type = other DNA
cagctaaaaagaagaaaaaaaaacc

SEQ ID NO: 777 - DNA, 25 bp, synthetic construct
  misc_feature 1..25: note = Oligonucleotide
  source 1..25: mol_type = other DNA
gatcagctaaaaagaagaaaaaaaa

SEQ ID NO: 778 - DNA, 25 bp, synthetic construct
  misc_feature 1..25: note = Oligonucleotide
  source 1..25: mol_type = other DNA
tgagatcagctaaaaagaagaaaaa

SEQ ID NO: 779 - DNA, 25 bp, synthetic construct
  misc_feature 1..25: note = Oligonucleotide
  source 1..25: mol_type = other DNA
ggatgagatcagctaaaaagaagaa

SEQ ID NO: 780 - DNA, 25 bp, synthetic construct
  misc_feature 1..25: note = Oligonucleotide
  source 1..25: mol_type = other DNA
ttaggatgagatcagctaaaaagaa

SEQ ID NO: 781 - DNA, 25 bp, synthetic construct
  misc_feature 1..25: note = Oligonucleotide
  source 1..25: mol_type = other DNA
tgcttaggatgagatcagctaaaaa

SEQ ID NO: 782 - DNA, 25 bp, synthetic construct
  misc_feature 1..25: note = Oligonucleotide
  source 1..25: mol_type = other DNA
gcatgcttaggatgagatcagctaa

SEQ ID NO: 783 - DNA, 25 bp, synthetic construct
  misc_feature 1..25: note = Oligonucleotide
  source 1..25: mol_type = other DNA
aaagcatgcttaggatgagatcagc

SEQ ID NO: 784 - DNA, 25 bp, synthetic construct
  misc_feature 1..25: note = Oligonucleotide
  source 1..25: mol_type = other DNA
aataaagcatgcttaggatgagatc

SEQ ID NO: 785 - DNA, 25 bp, synthetic construct
  misc_feature 1..25: note = Oligonucleotide
  source 1..25: mol_type = other DNA
aaaaataaagcatgcttaggatgag

SEQ ID NO: 786 - DNA, 25 bp, synthetic construct
  misc_feature 1..25: note = Oligonucleotide
  source 1..25: mol_type = other DNA
aggaaaaataaagcatgcttaggat

SEQ ID NO: 787 - DNA, 25 bp, synthetic construct
  misc_feature 1..25: note = Oligonucleotide
  source 1..25: mol_type = other DNA
tcaaggaaaaataaagcatgcttag

SEQ ID NO: 788 - DNA, 25 bp, synthetic construct
  misc_feature 1..25: note = Oligonucleotide
  source 1..25: mol_type = other DNA
ctttcaaggaaaaataaagcatgct

SEQ ID NO: 789 - DNA, 25 bp, synthetic construct
  misc_feature 1..25: note = Oligonucleotide
  source 1..25: mol_type = other DNA
tagctttcaaggaaaaataaagcat

SEQ ID NO: 790 - DNA, 25 bp, synthetic construct
  misc_feature 1..25: note = Oligonucleotide
  source 1..25: mol_type = other DNA
acctagctttcaaggaaaaataaag

SEQ ID NO: 791 - DNA, 25 bp, synthetic construct
  misc_feature 1..25: note = Oligonucleotide
  source 1..25: mol_type = other DNA
aatacctagctttcaaggaaaaata

SEQ ID NO: 792 - DNA, 25 bp, synthetic construct
  misc_feature 1..25: note = Oligonucleotide
  source 1..25: mol_type = other DNA
ataaatacctagctttcaaggaaaa

SEQ ID NO: 793 - DNA, 25 bp, synthetic construct
  misc_feature 1..25: note = Oligonucleotide
  source 1..25: mol_type = other DNA
ttgataaatacctagctttcaagga

SEQ ID NO: 794 - DNA, 25 bp, synthetic construct
  misc_feature 1..25: note = Oligonucleotide
  source 1..25: mol_type = other DNA
cagttgataaatacctagctttcaa

SEQ ID NO: 795 - DNA, 25 bp, synthetic construct
  misc_feature 1..25: note = Oligonucleotide
  source 1..25: mol_type = other DNA
ctgcagttgataaatacctagcttt

SEQ ID NO: 796 - DNA, 25 bp, synthetic construct
  misc_feature 1..25: note = Oligonucleotide
  source 1..25: mol_type = other DNA
catctgcagttgataaatacctagc

SEQ ID NO: 797 - DNA, 25 bp, synthetic construct
  misc_feature 1..25: note = Oligonucleotide
  source 1..25: mol_type = other DNA
taacatctgcagttgataaatacct

SEQ ID NO: 798 - DNA, 25 bp, synthetic construct
  misc_feature 1..25: note = Oligonucleotide
  source 1..25: mol_type = other DNA
caataacatctgcagttgataaata

SEQ ID NO: 799 - DNA, 25 bp, synthetic construct
  misc_feature 1..25: note = Oligonucleotide
  source 1..25: mol_type = other DNA
tttcaataacatctgcagttgataa

SEQ ID NO: 800 - DNA, 25 bp, synthetic construct
  misc_feature 1..25: note = Oligonucleotide
  source 1..25: mol_type = other DNA
ttctttcaataacatctgcagttga

SEQ ID NO: 801 - DNA, 25 bp, synthetic construct
  misc_feature 1..25: note = Oligonucleotide
  source 1..25: mol_type = other DNA
attttctttcaataacatctgcagt

SEQ ID NO: 802 - DNA, 25 bp, synthetic construct
  misc_feature 1..25: note = Oligonucleotide
  source 1..25: mol_type = other DNA
tttattttctttcaataacatctgc

SEQ ID NO: 803 - DNA, 25 bp, synthetic construct
  misc_feature 1..25: note = Oligonucleotide
  source 1..25: mol_type = other DNA
aattttattttctttcaataacatc

SEQ ID NO: 804 - DNA, 25 bp, synthetic construct
  misc_feature 1..25: note = Oligonucleotide
  source 1..25: mol_type = other DNA
ctgaattttattttctttcaataac

SEQ ID NO: 805 - DNA, 25 bp, synthetic construct
  misc_feature 1..25: note = Oligonucleotide
  source 1..25: mol_type = other DNA
agactgaattttattttctttcaat

SEQ ID NO: 806 - DNA, 25 bp, synthetic construct
  misc_feature 1..25: note = Oligonucleotide
  source 1..25: mol_type = other DNA
ttgagactgaattttattttctttc

SEQ ID NO: 807 - DNA, 25 bp, synthetic construct
  misc_feature 1..25: note = Oligonucleotide
  source 1..25: mol_type = other DNA
ctcttgagactgaattttattttct

SEQ ID NO: 808 - DNA, 25 bp, synthetic construct
  misc_feature 1..25: note = Oligonucleotide
  source 1..25: mol_type = other DNA
ttactcttgagactgaattttattt

SEQ ID NO: 809 - DNA, 25 bp, synthetic construct
  misc_feature 1..25: note = Oligonucleotide
  source 1..25: mol_type = other DNA
ggtttactcttgagactgaatttta

SEQ ID NO: 810 - DNA, 25 bp, synthetic construct
  misc_feature 1..25: note = Oligonucleotide
  source 1..25: mol_type = other DNA
cagggtttactcttgagactgaatt

SEQ ID NO: 811 - DNA, 25 bp, synthetic construct
  misc_feature 1..25: note = Oligonucleotide
  source 1..25: mol_type = other DNA
acacagggtttactcttgagactga

SEQ ID NO: 812 - DNA, 25 bp, synthetic construct
  misc_feature 1..25: note = Oligonucleotide
  source 1..25: mol_type = other DNA
aagacacagggtttactcttgagac

SEQ ID NO: 813 - DNA, 25 bp, synthetic construct
  misc_feature 1..25: note = Oligonucleotide
  source 1..25: mol_type = other DNA
cacaagacacagggtttactcttga

SEQ ID NO: 814 - DNA, 25 bp, synthetic construct
  misc_feature 1..25: note = Oligonucleotide
  source 1..25: mol_type = other DNA
agacacaagacacagggtttactct

SEQ ID NO: 815 - DNA, 25 bp, synthetic construct
  misc_feature 1..25: note = Oligonucleotide
  source 1..25: mol_type = other DNA
tacagacacaagacacagggtttac

SEQ ID NO: 816 - DNA, 25 bp, synthetic construct
  misc_feature 1..25: note = Oligonucleotide
  source 1..25: mol_type = other DNA
aactacagacacaagacacagggtt

SEQ ID NO: 817 - DNA, 25 bp, synthetic construct
  misc_feature 1..25: note = Oligonucleotide
  source 1..25: mol_type = other DNA
ttgaactacagacacaagacacagg

SEQ ID NO: 818 - DNA, 25 bp, synthetic construct
  misc_feature 1..25: note = Oligonucleotide
  source 1..25: mol_type = other DNA
cttttgaactacagacacaagacac

SEQ ID NO: 819 - DNA, 25 bp, synthetic construct
  misc_feature 1..25: note = Oligonucleotide
  source 1..25: mol_type = other DNA
tgacttttgaactacagacacaaga

SEQ ID NO: 820 - DNA, 25 bp, synthetic construct
  misc_feature 1..25: note = Oligonucleotide
  source 1..25: mol_type = other DNA
ttctgacttttgaactacagacaca

SEQ ID NO: 821 - DNA, 25 bp, synthetic construct
  misc_feature 1..25: note = Oligonucleotide
  source 1..25: mol_type = other DNA
catttctgacttttgaactacagac

SEQ ID NO: 822 - DNA, 25 bp, synthetic construct
  misc_feature 1..25: note = Oligonucleotide
  source 1..25: mol_type = other DNA
aatcatttctgacttttgaactaca

SEQ ID NO: 823 - DNA, 25 bp, synthetic construct
  misc_feature 1..25: note = Oligonucleotide
  source 1..25: mol_type = other DNA
tagaatcatttctgacttttgaact

SEQ ID NO: 824 - DNA, 25 bp, synthetic construct
  misc_feature 1..25: note = Oligonucleotide
  source 1..25: mol_type = other DNA
aattagaatcatttctgacttttga

SEQ ID NO: 825 - DNA, 25 bp, synthetic construct
  misc_feature 1..25: note = Oligonucleotide
  source 1..25: mol_type = other DNA
ttaaattagaatcatttctgacttt

SEQ ID NO: 826 - DNA, 25 bp, synthetic construct
  misc_feature 1..25: note = Oligonucleotide
  source 1..25: mol_type = other DNA
tgtttaaattagaatcatttctgac

SEQ ID NO: 827 - DNA, 25 bp, synthetic construct
  misc_feature 1..25: note = Oligonucleotide
  source 1..25: mol_type = other DNA
ttttgtttaaattagaatcatttct

SEQ ID NO: 828 - DNA, 25 bp, synthetic construct
  misc_feature 1..25: note = Oligonucleotide
  source 1..25: mol_type = other DNA
tctttttgtttaaattagaatcatt

SEQ ID NO: 829 - DNA, 25 bp, synthetic construct
  misc_feature 1..25: note = Oligonucleotide
  source 1..25: mol_type = other DNA
gtatctttttgtttaaattagaatc

SEQ ID NO: 830 - DNA, 25 bp, synthetic construct
  misc_feature 1..25: note = Oligonucleotide
  source 1..25: mol_type = other DNA
ttagtatctttttgtttaaattaga

SEQ ID NO: 831 - DNA, 25 bp, synthetic construct
  misc_feature 1..25: note = Oligonucleotide
  source 1..25: mol_type = other DNA
tatttagtatctttttgtttaaatt

SEQ ID NO: 832 - DNA, 25 bp, synthetic construct
  misc_feature 1..25: note = Oligonucleotide
  source 1..25: mol_type = other DNA
gtatatttagtatctttttgtttaa

SEQ ID NO: 833 - DNA, 25 bp, synthetic construct
  misc_feature 1..25: note = Oligonucleotide
  source 1..25: mol_type = other DNA
tctgtatatttagtatctttttgtt

SEQ ID NO: 834 - DNA, 25 bp, synthetic construct
  misc_feature 1..25: note = Oligonucleotide
  source 1..25: mol_type = other DNA
acttctgtatatttagtatcttttt

SEQ ID NO: 835 - DNA, 25 bp, synthetic construct
  misc_feature 1..25: note = Oligonucleotide
  source 1..25: mol_type = other DNA
ttaacttctgtatatttagtatctt

SEQ ID NO: 836 - DNA, 25 bp, synthetic construct
  misc_feature 1..25: note = Oligonucleotide
  source 1..25: mol_type = other DNA
aatttaacttctgtatatttagtat

SEQ ID NO: 837 - DNA, 25 bp, synthetic construct
  misc_feature 1..25: note = Oligonucleotide
  source 1..25: mol_type = other DNA
tcgaatttaacttctgtatatttag

SEQ ID NO: 838 - DNA, 25 bp, synthetic construct
  misc_feature 1..25: note = Oligonucleotide
  source 1..25: mol_type = other DNA
agttcgaatttaacttctgtatatt

SEQ ID NO: 839 - DNA, 25 bp, synthetic construct
  misc_feature 1..25: note = Oligonucleotide
  source 1..25: mol_type = other DNA
gctagttcgaatttaacttctgtat

SEQ ID NO: 840 - DNA, 25 bp, synthetic construct
  misc_feature 1..25: note = Oligonucleotide
  source 1..25: mol_type = other DNA
gtggctagttcgaatttaacttctg

SEQ ID NO: 841 - DNA, 25 bp, synthetic construct
  misc_feature 1..25: note = Oligonucleotide
  source 1..25: mol_type = other DNA
tctgtggctagttcgaatttaactt

SEQ ID NO: 842 - DNA, 25 bp, synthetic construct
  misc_feature 1..25: note = Oligonucleotide
  source 1..25: mol_type = other DNA
gattctgtggctagttcgaatttaa

SEQ ID NO: 843 - DNA, 25 bp, synthetic construct
  misc_feature 1..25: note = Oligonucleotide
  source 1..25: mol_type = other DNA
aatgattctgtggctagttcgaatt

SEQ ID NO: 844 - DNA, 25 bp, synthetic construct
  misc_feature 1..25: note = Oligonucleotide
  source 1..25: mol_type = other DNA
acaaatgattctgtggctagttcga

SEQ ID NO: 845 - DNA, 25 bp, synthetic construct
  misc_feature 1..25: note = Oligonucleotide
  source 1..25: mol_type = other DNA
aaaacaaatgattctgtggctagtt

SEQ ID NO: 846 - DNA, 25 bp, synthetic construct
  misc_feature 1..25: note = Oligonucleotide
  source 1..25: mol_type = other DNA
ataaaaacaaatgattctgtggcta

SEQ ID NO: 847 - DNA, 25 bp, synthetic construct
  misc_feature 1..25: note = Oligonucleotide
  source 1..25: mol_type = other DNA
gacataaaaacaaatgattctgtgg

SEQ ID NO: 848 - DNA, 25 bp, synthetic construct
  misc_feature 1..25: note = Oligonucleotide
  source 1..25: mol_type = other DNA
tctgacataaaaacaaatgattctg

SEQ ID NO: 849 - DNA, 25 bp, synthetic construct
  misc_feature 1..25: note = Oligonucleotide
  source 1..25: mol_type = other DNA
aattctgacataaaaacaaatgatt

SEQ ID NO: 850 - DNA, 25 bp, synthetic construct
  misc_feature 1..25: note = Oligonucleotide
  source 1..25: mol_type = other DNA
gcaaattctgacataaaaacaaatg

SEQ ID NO: 851 - DNA, 25 bp, synthetic construct
  misc_feature 1..25: note = Oligonucleotide
  source 1..25: mol_type = other DNA
tttgcaaattctgacataaaaacaa

SEQ ID NO: 852 - DNA, 25 bp, synthetic construct
  misc_feature 1..25: note = Oligonucleotide
  source 1..25: mol_type = other DNA
ctctttgcaaattctgacataaaaa

SEQ ID NO: 853 - DNA, 25 bp, synthetic construct
  misc_feature 1..25: note = Oligonucleotide
  source 1..25: mol_type = other DNA
ccactctttgcaaattctgacataa

SEQ ID NO: 854 - DNA, 25 bp, synthetic construct
  misc_feature 1..25: note = Oligonucleotide
  source 1..25: mol_type = other DNA
actccactctttgcaaattctgaca

SEQ ID NO: 855 - DNA, 25 bp, synthetic construct
  misc_feature 1..25: note = Oligonucleotide
  source 1..25: mol_type = other DNA
tccactccactctttgcaaattctg

SEQ ID NO: 856 - DNA, 25 bp, synthetic construct
  misc_feature 1..25: note = Oligonucleotide
  source 1..25: mol_type = other DNA
ttgtccactccactctttgcaaatt

SEQ ID NO: 857 - DNA, 25 bp, synthetic construct
  misc_feature 1..25: note = Oligonucleotide
  source 1..25: mol_type = other DNA
gctttgtccactccactctttgcaa

SEQ ID NO: 858 - DNA, 25 bp, synthetic construct
  misc_feature 1..25: note = Oligonucleotide
  source 1..25: mol_type = other DNA
agagctttgtccactccactctttg

SEQ ID NO: 859 - DNA, 25 bp, synthetic construct
  misc_feature 1..25: note = Oligonucleotide
  source 1..25: mol_type = other DNA
tacagagctttgtccactccactct

SEQ ID NO: 860 - DNA, 25 bp, synthetic construct
  misc_feature 1..25: note = Oligonucleotide
  source 1..25: mol_type = other DNA
ccatacagagctttgtccactccac

SEQ ID NO: 861 - DNA, 25 bp, synthetic construct
  misc_feature 1..25: note = Oligonucleotide
  source 1..25: mol_type = other DNA
cttccatacagagctttgtccactc

SEQ ID NO: 862 - DNA, 25 bp, synthetic construct
  misc_feature 1..25: note = Oligonucleotide
  source 1..25: mol_type = other DNA
agtcttccatacagagctttgtcca

SEQ ID NO: 863 - DNA, 25 bp, synthetic construct
  misc_feature 1..25: note = Oligonucleotide
  source 1..25: mol_type = other DNA
ttcagtcttccatacagagctttgt

SEQ ID NO: 864 - DNA, 25 bp, synthetic construct
  misc_feature 1..25: note = Oligonucleotide
  source 1..25: mol_type = other DNA
ttgttcagtcttccatacagagctt

SEQ ID NO: 865 - DNA, 25 bp, synthetic construct
  misc_feature 1..25: note = Oligonucleotide
  source 1..25: mol_type = other DNA
cagttgttcagtcttccatacagag

SEQ ID NO: 866 - DNA, 25 bp, synthetic construct
  misc_feature 1..25: note = Oligonucleotide
  source 1..25: mol_type = other DNA
ttacagttgttcagtcttccataca

SEQ ID NO: 867 - DNA, 25 bp, synthetic construct
  misc_feature 1..25: note = Oligonucleotide
  source 1..25: mol_type = other DNA
tatttacagttgttcagtcttccat

SEQ ID NO: 868 - DNA, 25 bp, synthetic construct
  misc_feature 1..25: note = Oligonucleotide
  source 1..25: mol_type = other DNA
atctatttacagttgttcagtcttc

SEQ ID NO: 869 - DNA, 25 bp, synthetic construct
  misc_feature 1..25: note = Oligonucleotide
  source 1..25: mol_type = other DNA
atcatctatttacagttgttcagtc

SEQ ID NO: 870 - DNA, 25 bp, synthetic construct
  misc_feature 1..25: note = Oligonucleotide
  source 1..25: mol_type = other DNA
gatatcatctatttacagttgttca

SEQ ID NO: 871 - DNA, 25 bp, synthetic construct
  misc_feature 1..25: note = Oligonucleotide
  source 1..25: mol_type = other DNA
ttggatatcatctatttacagttgt

SEQ ID NO: 872 - DNA, 25 bp, synthetic construct
  misc_feature 1..25: note = Oligonucleotide
  source 1..25: mol_type = other DNA
agtttggatatcatctatttacagt

SEQ ID NO: 873 - DNA, 25 bp, synthetic construct
  misc_feature 1..25: note = Oligonucleotide
  source 1..25: mol_type = other DNA
ttaagtttggatatcatctatttac

SEQ ID NO: 874 - DNA, 25 bp, synthetic construct
  misc_feature 1..25: note = Oligonucleotide
  source 1..25: mol_type = other DNA
aaattaagtttggatatcatctatt

SEQ ID NO: 875 - DNA, 25 bp, synthetic construct
  misc_feature 1..25: note = Oligonucleotide
  source 1..25: mol_type = other DNA
gccaaattaagtttggatatcatct

SEQ ID NO: 876 - DNA, 25 bp, synthetic construct
  misc_feature 1..25: note = Oligonucleotide
  source 1..25: mol_type = other DNA
ctagccaaattaagtttggatatca

SEQ ID NO: 877 - DNA, 25 bp, synthetic construct
  misc_feature 1..25: note = Oligonucleotide
  source 1..25: mol_type = other DNA
gtcctagccaaattaagtttggata

SEQ ID NO: 878 - DNA, 25 bp, synthetic construct
  misc_feature 1..25: note = Oligonucleotide
  source 1..25: mol_type = other DNA
gaagtcctagccaaattaagtttgg

SEQ ID NO: 879 - DNA, 25 bp, synthetic construct
  misc_feature 1..25: note = Oligonucleotide
  source 1..25: mol_type = other DNA
attgaagtcctagccaaattaagtt

SEQ ID NO: 880 - DNA, 25 bp, synthetic construct
  misc_feature 1..25: note = Oligonucleotide
  source 1..25: mol_type = other DNA
aaaattgaagtcctagccaaattaa

SEQ ID NO: 881 - DNA, 25 bp, synthetic construct
  misc_feature 1..25: note = Oligonucleotide
  source 1..25: mol_type = other DNA
tttaaaattgaagtcctagccaaat

SEQ ID NO: 882 - DNA, 25 bp, synthetic construct
  misc_feature 1..25: note = Oligonucleotide
  source 1..25: mol_type = other DNA
atttttaaaattgaagtcctagcca

SEQ ID NO: 883 - DNA, 25 bp, synthetic construct
  misc_feature 1..25: note = Oligonucleotide
  source 1..25: mol_type = other DNA
ctgatttttaaaattgaagtcctag

SEQ ID NO: 884 - DNA, 25 bp, synthetic construct
  misc_feature 1..25: note = Oligonucleotide
  source 1..25: mol_type = other DNA
acactgatttttaaaattgaagtcc

SEQ ID NO: 885 - DNA, 25 bp, synthetic construct
  misc_feature 1..25: note = Oligonucleotide
  source 1..25: mol_type = other DNA
ggtacactgatttttaaaattgaag

SEQ ID NO: 886 - DNA, 25 bp, synthetic construct
  misc_feature 1..25: note = Oligonucleotide
  source 1..25: mol_type = other DNA
ctaggtacactgatttttaaaattg

SEQ ID NO: 887 - DNA, 25 bp, synthetic construct
  misc_feature 1..25: note = Oligonucleotide
  source 1..25: mol_type = other DNA
tgcctaggtacactgatttttaaaa

SEQ ID NO: 888 - DNA, 25 bp, synthetic construct
  misc_feature 1..25: note = Oligonucleotide
  source 1..25: mol_type = other DNA
cactgcctaggtacactgattttta

SEQ ID NO: 889 - DNA, 25 bp, synthetic construct
  misc_feature 1..25: note = Oligonucleotide
  source 1..25: mol_type = other DNA
gtgcactgcctaggtacactgattt

SEQ ID NO: 890 - DNA, 25 bp, synthetic construct
  misc_feature 1..25: note = Oligonucleotide
  source 1..25: mol_type = other DNA
gctgtgcactgcctaggtacactga

SEQ ID NO: 891 - DNA, 25 bp, synthetic construct
  misc_feature 1..25: note = Oligonucleotide
  source 1..25: mol_type = other DNA
cgtgctgtgcactgcctaggtacac

SEQ ID NO: 892 - DNA, 25 bp, synthetic construct
  misc_feature 1..25: note = Oligonucleotide
  source 1..25: mol_type = other DNA
tttcgtgctgtgcactgcctaggta

SEQ ID NO: 893 - DNA, 25 bp, synthetic construct
  misc_feature 1..25: note = Oligonucleotide
  source 1..25: mol_type = other DNA
ttatttcgtgctgtgcactgcctag

SEQ ID NO: 894 - DNA, 25 bp, synthetic construct
  misc_feature 1..25: note = Oligonucleotide
  source 1..25: mol_type = other DNA
cacttatttcgtgctgtgcactgcc

SEQ ID NO: 895 - DNA, 25 bp, synthetic construct
  misc_feature 1..25: note = Oligonucleotide
  source 1..25: mol_type = other DNA
ggccacttatttcgtgctgtgcact

SEQ ID NO: 896 - DNA, 25 bp, synthetic construct
  misc_feature 1..25: note = Oligonucleotide
  source 1..25: mol_type = other DNA
aagggccacttatttcgtgctgtgc

SEQ ID NO: 897 - DNA, 25 bp, synthetic construct
  misc_feature 1..25: note = Oligonucleotide
  source 1..25: mol_type = other DNA
tgcaagggccacttatttcgtgctg

SEQ ID NO: 898 - DNA, 25 bp, synthetic construct
  misc_feature 1..25: note = Oligonucleotide
  source 1..25: mol_type = other DNA
agctgcaagggccacttatttcgtg

SEQ ID NO: 899 - DNA, 25 bp, synthetic construct
  misc_feature 1..25: note = Oligonucleotide
  source 1..25: mol_type = other DNA
ggaagctgcaagggccacttatttc

SEQ ID NO: 900 - DNA, 25 bp, synthetic construct
  misc_feature 1..25: note = Oligonucleotide
  source 1..25: mol_type = other DNA
cggggaagctgcaagggccacttat

SEQ ID NO: 901 - DNA, 25 bp, synthetic construct
  misc_feature 1..25: note = Oligonucleotide
  source 1..25: mol_type = other DNA
aaacggggaagctgcaagggccact

SEQ ID NO: 902 - DNA, 25 bp, synthetic construct
  misc_feature 1..25: note = Oligonucleotide
  source 1..25: mol_type = other DNA
gttaaacggggaagctgcaagggcc

SEQ ID NO: 903 - DNA, 25 bp, synthetic construct
  misc_feature 1..25: note = Oligonucleotide
  source 1..25: mol_type = other DNA
tgggttaaacggggaagctgcaagg

SEQ ID NO: 904 - DNA, 25 bp, synthetic construct
  misc_feature 1..25: note = Oligonucleotide
  source 1..25: mol_type = other DNA
cagtgggttaaacggggaagctgca

SEQ ID NO: 905 - DNA, 25 bp, synthetic construct
  misc_feature 1..25: note = Oligonucleotide
  source 1..25: mol_type = other DNA
gcacagtgggttaaacggggaagct

SEQ ID NO: 906 - DNA, 25 bp, synthetic construct
  misc_feature 1..25: note = Oligonucleotide
  source 1..25: mol_type = other DNA
atagcacagtgggttaaacggggaa

SEQ ID NO: 907 - DNA, 25 bp, synthetic construct
  misc_feature 1..25: note = Oligonucleotide
  source 1..25: mol_type = other DNA
actatagcacagtgggttaaacggg

SEQ ID NO: 908 - DNA, 25 bp, synthetic construct
  misc_feature 1..25: note = Oligonucleotide
  source 1..25: mol_type = other DNA
gcaactatagcacagtgggttaaac

SEQ ID NO: 909 - DNA, 25 bp, synthetic construct
  misc_feature 1..25: note = Oligonucleotide
  source 1..25: mol_type = other DNA
cccgcaactatagcacagtgggtta

SEQ ID NO: 910 - DNA, 25 bp, synthetic construct
  misc_feature 1..25: note = Oligonucleotide
  source 1..25: mol_type = other DNA
ccacccgcaactatagcacagtggg

SEQ ID NO: 911 - DNA, 25 bp, synthetic construct
  misc_feature 1..25: note = Oligonucleotide
  source 1..25: mol_type = other DNA
gttccacccgcaactatagcacagt

SEQ ID NO: 912 - DNA, 25 bp, synthetic construct
  misc_feature 1..25: note = Oligonucleotide
  source 1..25: mol_type = other DNA
actgttccacccgcaactatagcac

SEQ ID NO: 913 - DNA, 25 bp, synthetic construct
  misc_feature 1..25: note = Oligonucleotide
  source 1..25: mol_type = other DNA
ttgactgttccacccgcaactatag

SEQ ID NO: 914 - DNA, 25 bp, synthetic construct
  misc_feature 1..25: note = Oligonucleotide
  source 1..25: mol_type = other DNA
aggttgactgttccacccgcaacta

SEQ ID NO: 915 - DNA, 25 bp, synthetic construct
  misc_feature 1..25: note = Oligonucleotide
  source 1..25: mol_type = other DNA
gaaaggttgactgttccacccgcaa

SEQ ID NO: 916 - DNA, 25 bp, synthetic construct
  misc_feature 1..25: note = Oligonucleotide
  source 1..25: mol_type = other DNA
ctagaaaggttgactgttccacccg

SEQ ID NO: 917 - DNA, 25 bp, synthetic construct
  misc_feature 1..25: note = Oligonucleotide
  source 1..25: mol_type = other DNA
ctactagaaaggttgactgttccac

SEQ ID NO: 918 - DNA, 25 bp, synthetic construct
  misc_feature 1..25: note = Oligonucleotide
  source 1..25: mol_type = other DNA
aaactactagaaaggttgactgttc

SEQ ID NO: 919 - DNA, 25 bp, synthetic construct
  misc_feature 1..25: note = Oligonucleotide
  source 1..25: mol_type = other DNA
cataaactactagaaaggttgactg

SEQ ID NO: 920 - DNA, 25 bp, synthetic construct
  misc_feature 1..25: note = Oligonucleotide
  source 1..25: mol_type = other DNA
tatcataaactactagaaaggttga

SEQ ID NO: 921 - DNA, 25 bp, synthetic construct
  misc_feature 1..25: note = Oligonucleotide
  source 1..25: mol_type = other DNA
caatatcataaactactagaaaggt

SEQ ID NO: 922 - DNA, 25 bp, synthetic construct
  misc_feature 1..25: note = Oligonucleotide
  source 1..25: mol_type = other DNA
gggcaatatcataaactactagaaa

SEQ ID NO: 923 - DNA, 25 bp, synthetic construct
  misc_feature 1..25: note = Oligonucleotide
  source 1..25: mol_type = other DNA
agagggcaatatcataaactactag

SEQ ID NO: 924 - DNA, 25 bp, synthetic construct
  misc_feature 1..25: note = Oligonucleotide
  source 1..25: mol_type = other DNA
caaagagggcaatatcataaactac

SEQ ID NO: 925 - DNA, 25 bp, synthetic construct
  misc_feature 1..25: note = Oligonucleotide
  source 1..25: mol_type = other DNA
atacaaagagggcaatatcataaac

SEQ ID NO: 926 - DNA, 25 bp, synthetic construct
  misc_feature 1..25: note = Oligonucleotide
  source 1..25: mol_type = other DNA
ggaatacaaagagggcaatatcata

SEQ ID NO: 927 - DNA, 25 bp, synthetic construct
  misc_feature 1..25: note = Oligonucleotide
  source 1..25: mol_type = other DNA
atgggaatacaaagagggcaatatc

SEQ ID NO: 928 - DNA, 25 bp, synthetic construct
  misc_feature 1..25: note = Oligonucleotide
  source 1..25: mol_type = other DNA
aaaatgggaatacaaagagggcaat

SEQ ID NO: 929 - DNA, 25 bp, synthetic construct
  misc_feature 1..25: note = Oligonucleotide
  source 1..25: mol_type = other DNA
tagaaaatgggaatacaaagagggc

SEQ ID NO: 930 - DNA, 25 bp, synthetic construct
  misc_feature 1..25: note = Oligonucleotide
  source 1..25: mol_type = other DNA
ctgtagaaaatgggaatacaaagag

SEQ ID NO: 931 - DNA, 25 bp, synthetic construct
  misc_feature 1..25: note = Oligonucleotide
  source 1..25: mol_type = other DNA
aaactgtagaaaatgggaatacaaa

SEQ ID NO: 932 - DNA, 25 bp, synthetic construct
  misc_feature 1..25: note = Oligonucleotide
  source 1..25: mol_type = other DNA
aaaaaactgtagaaaatgggaatac

SEQ ID NO: 933 - DNA, 25 bp, synthetic construct
  misc_feature 1..25: note = Oligonucleotide
  source 1..25: mol_type = other DNA
cggaaaaaactgtagaaaatgggaa

SEQ ID NO: 934 - DNA, 25 bp, synthetic construct
  misc_feature 1..25: note = Oligonucleotide
  source 1..25: mol_type = other DNA
ctgcggaaaaaactgtagaaaatgg

SEQ ID NO: 935 - DNA, 25 bp, synthetic construct
  misc_feature 1..25: note = Oligonucleotide
  source 1..25: mol_type = other DNA
agtctgcggaaaaaactgtagaaaa

SEQ ID NO: 936 - DNA, 25 bp, synthetic construct
  misc_feature 1..25: note = Oligonucleotide
  source 1..25: mol_type = other DNA
agaagtctgcggaaaaaactgtaga

SEQ ID NO: 937 - DNA, 25 bp, synthetic construct
  misc_feature 1..25: note = Oligonucleotide
  source 1..25: mol_type = other DNA
gaaagaagtctgcggaaaaaactgt

SEQ ID NO: 938 - DNA, 25 bp, synthetic construct
  misc_feature 1..25: note = Oligonucleotide
  source 1..25: mol_type = other DNA
gcagaaagaagtctgcggaaaaaac

SEQ ID NO: 939 - DNA, 25 bp, synthetic construct
  misc_feature 1..25: note = Oligonucleotide
  source 1..25: mol_type = other DNA
tttgcagaaagaagtctgcggaaaa

SEQ ID NO: 940 - DNA, 25 bp, synthetic construct
  misc_feature 1..25: note = Oligonucleotide
  source 1..25: mol_type = other DNA
taatttgcagaaagaagtctgcgga

SEQ ID NO: 941 - DNA, 25 bp, synthetic construct
  misc_feature 1..25: note = Oligonucleotide
  source 1..25: mol_type = other DNA
gaataatttgcagaaagaagtctgc

SEQ ID NO: 942 - DNA, 25 bp, synthetic construct
  misc_feature 1..25: note = Oligonucleotide
  source 1..25: mol_type = other DNA
gctgaataatttgcagaaagaagtc

SEQ ID NO: 943 - DNA, 25 bp, synthetic construct
  misc_feature 1..25: note = Oligonucleotide
  source 1..25: mol_type = other DNA
gaggctgaataatttgcagaaagaa

SEQ ID NO: 944 - DNA, 25 bp, synthetic construct
  misc_feature 1..25: note = Oligonucleotide
  source 1..25: mol_type = other DNA
ttggaggctgaataatttgcagaaa

SEQ ID NO: 945 - DNA, 25 bp, synthetic construct
  misc_feature 1..25: note = Oligonucleotide
  source 1..25: mol_type = other DNA
catttggaggctgaataatttgcag

SEQ ID NO: 946 - DNA, 25 bp, synthetic construct
  misc_feature 1..25: note = Oligonucleotide
  source 1..25: mol_type = other DNA
ttgcatttggaggctgaataatttg

SEQ ID NO: 947 - DNA, 25 bp, synthetic construct
  misc_feature 1..25: note = Oligonucleotide
  source 1..25: mol_type = other DNA
catttgcatttggaggctgaataat

SEQ ID NO: 948 - DNA, 25 bp, synthetic construct
  misc_feature 1..25: note = Oligonucleotide
  source 1..25: mol_type = other DNA
attcatttgcatttggaggctgaat

SEQ ID NO: 949 - DNA, 25 bp, synthetic construct
  misc_feature 1..25: note = Oligonucleotide
  source 1..25: mol_type = other DNA
atcattcatttgcatttggaggctg

SEQ ID NO: 950 - DNA, 25 bp, synthetic construct
  misc_feature 1..25: note = Oligonucleotide
  source 1..25: mol_type = other DNA
tatatcattcatttgcatttggagg

SEQ ID NO: 951 - DNA, 25 bp, synthetic construct
  misc_feature 1..25: note = Oligonucleotide
  source 1..25: mol_type = other DNA
ttttatatcattcatttgcatttgg

SEQ ID NO: 952 - DNA, 25 bp, synthetic construct
  misc_feature 1..25: note = Oligonucleotide
  source 1..25: mol_type = other DNA
tatttttatatcattcatttgcatt

SEQ ID NO: 953 - DNA, 25 bp, synthetic construct
  misc_feature 1..25: note = Oligonucleotide
  source 1..25: mol_type = other DNA
acttatttttatatcattcatttgc

SEQ ID NO: 954 - DNA, 25 bp, synthetic construct
  misc_feature 1..25: note = Oligonucleotide
  source 1..25: mol_type = other DNA
cctacttatttttatatcattcatt

SEQ ID NO: 955 - DNA, 25 bp, synthetic construct
  misc_feature 1..25: note = Oligonucleotide
  source 1..25: mol_type = other DNA
ttccctacttatttttatatcattc

SEQ ID NO: 956 - DNA, 25 bp, synthetic construct
  misc_feature 1..25: note = Oligonucleotide
  source 1..25: mol_type = other DNA
atgttccctacttatttttatatca

SEQ ID NO: 957 - DNA, 25 bp, synthetic construct
  misc_feature 1..25: note = Oligonucleotide
  source 1..25: mol_type = other DNA
gccatgttccctacttatttttata

SEQ ID NO: 958 - DNA, 25 bp, synthetic construct
  misc_feature 1..25: note = Oligonucleotide
  source 1..25: mol_type = other DNA
tctgccatgttccctacttattttt

SEQ ID NO: 959 - DNA, 25 bp, synthetic construct
  misc_feature 1..25: note = Oligonucleotide
  source 1..25: mol_type = other DNA
ctctctgccatgttccctacttatt

SEQ ID NO: 960 - DNA, 25 bp, synthetic construct
  misc_feature 1..25: note = Oligonucleotide
  source 1..25: mol_type = other DNA
ccactctctgccatgttccctactt

SEQ ID NO: 961 - DNA, 25 bp, synthetic construct
  misc_feature 1..25: note = Oligonucleotide
  source 1..25: mol_type = other DNA
gcaccactctctgccatgttcccta

SEQ ID NO: 962 - DNA, 25 bp, synthetic construct
  misc_feature 1..25: note = Oligonucleotide
  source 1..25: mol_type = other DNA
gaagcaccactctctgccatgttcc

SEQ ID NO: 963 - DNA, 25 bp, synthetic construct
  misc_feature 1..25: note = Oligonucleotide
  source 1..25: mol_type = other DNA
tgggaagcaccactctctgccatgt

SEQ ID NO: 964 - DNA, 25 bp, synthetic construct
  misc_feature 1..25: note = Oligonucleotide
  source 1..25: mol_type = other DNA
ggctgggaagcaccactctctgcca

SEQ ID NO: 965 - DNA, 25 bp, synthetic construct
  misc_feature 1..25: note = Oligonucleotide
  source 1..25: mol_type = other DNA
tgaggctgggaagcaccactctctg

SEQ ID NO: 966 - DNA, 25 bp, synthetic construct
  misc_feature 1..25: note = Oligonucleotide
  source 1..25: mol_type = other DNA
ttgtgaggctgggaagcaccactct

SEQ ID NO: 967 - DNA, 25 bp, synthetic construct
  misc_feature 1..25: note = Oligonucleotide
  source 1..25: mol_type = other DNA
acattgtgaggctgggaagcaccac

SEQ ID NO: 968 - DNA, 25 bp, synthetic construct
  misc_feature 1..25: note = Oligonucleotide
  source 1..25: mol_type = other DNA
cccacattgtgaggctgggaagcac

SEQ ID NO: 969 - DNA, 25 bp, synthetic construct
  misc_feature 1..25: note = Oligonucleotide
  source 1..25: mol_type = other DNA
attcccacattgtgaggctgggaag

SEQ ID NO: 970 - DNA, 25 bp, synthetic construct
  misc_feature 1..25: note = Oligonucleotide
  source 1..25: mol_type = other DNA
caaattcccacattgtgaggctggg

SEQ ID NO: 971 - DNA, 25 bp, synthetic construct
  misc_feature 1..25: note = Oligonucleotide
  source 1..25: mol_type = other DNA
tgtcaaattcccacattgtgaggct

SEQ ID NO: 972 - DNA, 25 bp, synthetic construct
  misc_feature 1..25: note = Oligonucleotide
  source 1..25: mol_type = other DNA
ctatgtcaaattcccacattgtgag

SEQ ID NO: 973 - DNA, 25 bp, synthetic construct
  misc_feature 1..25: note = Oligonucleotide
  source 1..25: mol_type = other DNA
atcctatgtcaaattcccacattgt

SEQ ID NO: 974 - DNA, 25 bp, synthetic construct
  misc_feature 1..25: note = Oligonucleotide
  source 1..25: mol_type = other DNA
ctcatcctatgtcaaattcccacat

SEQ ID NO: 975 - DNA, 25 bp, synthetic construct
  misc_feature 1..25: note = Oligonucleotide
  source 1..25: mol_type = other DNA
actctcatcctatgtcaaattccca

SEQ ID NO: 976 - DNA, 25 bp, synthetic construct
  misc_feature 1..25: note = Oligonucleotide
  source 1..25: mol_type = other DNA
ctgactctcatcctatgtcaaattc

SEQ ID NO: 977 - DNA, 25 bp, synthetic construct
  misc_feature 1..25: note = Oligonucleotide
  source 1..25: mol_type = other DNA
actctgactctcatcctatgtcaaa

SEQ ID NO: 978 - DNA, 25 bp, synthetic construct
  misc_feature 1..25: note = Oligonucleotide
  source 1..25: mol_type = other DNA
tatactctgactctcatcctatgtc

SEQ ID NO: 979 - DNA, 25 bp, synthetic construct
  misc_feature 1..25: note = Oligonucleotide
  source 1..25: mol_type = other DNA
acctatactctgactctcatcctat

SEQ ID NO: 980 - DNA, 25 bp, synthetic construct
  misc_feature 1..25: note = Oligonucleotide
  source 1..25: mol_type = other DNA
taaacctatactctgactctcatcc

SEQ ID NO: 981 - DNA, 25 bp, synthetic construct
  misc_feature 1..25: note = Oligonucleotide
  source 1..25: mol_type = other DNA
ttttaaacctatactctgactctca

SEQ ID NO: 982 - DNA, 25 bp, synthetic construct
  misc_feature 1..25: note = Oligonucleotide
  source 1..25: mol_type = other DNA
atcttttaaacctatactctgactc

SEQ ID NO: 983 - DNA, 25 bp, synthetic construct
  misc_feature 1..25: note = Oligonucleotide
  source 1..25: mol_type = other DNA
tttatcttttaaacctatactctga

SEQ ID NO: 984 - DNA, 25 bp, synthetic construct
  misc_feature 1..25: note = Oligonucleotide
  source 1..25: mol_type = other DNA
gattttatcttttaaacctatactc

SEQ ID NO: 985 - DNA, 25 bp, synthetic construct
  misc_feature 1..25: note = Oligonucleotide
  source 1..25: mol_type = other DNA
aaagattttatcttttaaacctata

SEQ ID NO: 986 - DNA, 25 bp, synthetic construct
  misc_feature 1..25: note = Oligonucleotide
  source 1..25: mol_type = other DNA
actaaagattttatcttttaaacct

SEQ ID NO: 987 - DNA, 25 bp, synthetic construct
  misc_feature 1..25: note = Oligonucleotide
  source 1..25: mol_type = other DNA
ttaactaaagattttatcttttaaa

SEQ ID NO: 988 - DNA, 25 bp, synthetic construct
  misc_feature 1..25: note = Oligonucleotide
  source 1..25: mol_type = other DNA
ttattaactaaagattttatctttt

SEQ ID NO: 989 - DNA, 25 bp, synthetic construct
  misc_feature 1..25: note = Oligonucleotide
  source 1..25: mol_type = other DNA
aaattattaactaaagattttatct

SEQ ID NO: 990 - DNA, 25 bp, synthetic construct
  misc_feature 1..25: note = Oligonucleotide
  source 1..25: mol_type = other DNA
acaaaattattaactaaagatttta

SEQ ID NO: 991 - DNA, 25 bp, synthetic construct
  misc_feature 1..25: note = Oligonucleotide
  source 1..25: mol_type = other DNA
aatacaaaattattaactaaagatt

SEQ ID NO: 992 - DNA, 25 bp, synthetic construct
  misc_feature 1..25: note = Oligonucleotide
  source 1..25: mol_type = other DNA
ataaatacaaaattattaactaaag

SEQ ID NO: 993 - DNA, 25 bp, synthetic construct
  misc_feature 1..25: note = Oligonucleotide
  source 1..25: mol_type = other DNA
taaataaatacaaaattattaacta

SEQ ID NO: 994 - DNA, 25 bp, synthetic construct
  misc_feature 1..25: note = Oligonucleotide
  source 1..25: mol_type = other DNA
gaataaataaatacaaaattattaa

SEQ ID NO: 995 - DNA, 25 bp, synthetic construct
  misc_feature 1..25: note = Oligonucleotide
  source 1..25: mol_type = other DNA
ctagaataaataaatacaaaattat

SEQ ID NO: 996 - DNA, 25 bp, synthetic construct
  misc_feature 1..25: note = Oligonucleotide
  source 1..25: mol_type = other DNA
catctagaataaataaatacaaaat

SEQ ID NO: 997 - DNA, 25 bp, synthetic construct
  misc_feature 1..25: note = Oligonucleotide
  source 1..25: mol_type = other DNA
atacatctagaataaataaatacaa

SEQ ID NO: 998 - DNA, 25 bp, synthetic construct
  misc_feature 1..25: note = Oligonucleotide
  source 1..25: mol_type = other DNA
tacatacatctagaataaataaata

SEQ ID NO: 999 - DNA, 25 bp, synthetic construct
  misc_feature 1..25: note = Oligonucleotide
  source 1..25: mol_type = other DNA
agatacatacatctagaataaataa

SEQ ID NO: 1000 - DNA, 25 bp, synthetic construct
  misc_feature 1..25: note = Oligonucleotide
  source 1..25: mol_type = other DNA
ctcagatacatacatctagaataaa

SEQ ID NO: 1001 - DNA, 25 bp, synthetic construct
  misc_feature 1..25: note = Oligonucleotide
  source 1..25: mol_type = other DNA
ttcctcagatacatacatctagaat

SEQ ID NO: 1002 - DNA, 25 bp, synthetic construct
  misc_feature 1..25: note = Oligonucleotide
  source 1..25: mol_type = other DNA
tctttcctcagatacatacatctag

SEQ ID NO: 1003 - DNA, 25 bp, synthetic construct
  misc_feature 1..25: note = Oligonucleotide
  source 1..25: mol_type = other DNA
atttctttcctcagatacatacatc

SEQ ID NO: 1004 - DNA, 25 bp, synthetic construct
  misc_feature 1..25: note = Oligonucleotide
  source 1..25: mol_type = other DNA
cagatttctttcctcagatacatac

SEQ ID NO: 1005 - DNA, 25 bp, synthetic construct
  misc_feature 1..25: note = Oligonucleotide
  source 1..25: mol_type = other DNA
taccagatttctttcctcagataca

SEQ ID NO: 1006 - DNA, 25 bp, synthetic construct
  misc_feature 1..25: note = Oligonucleotide
  source 1..25: mol_type = other DNA
aaataccagatttctttcctcagat

SEQ ID NO: 1007 - DNA, 25 bp, synthetic construct
  misc_feature 1..25: note = Oligonucleotide
  source 1..25: mol_type = other DNA
caaaaataccagatttctttcctca

SEQ ID NO: 1008 - DNA, 25 bp, synthetic construct
  misc_feature 1..25: note = Oligonucleotide
  source 1..25: mol_type = other DNA
aagcaaaaataccagatttctttcc

SEQ ID NO: 1009 - DNA, 25 bp, synthetic construct
  misc_feature 1..25: note = Oligonucleotide
  source 1..25: mol_type = other DNA
ggaaagcaaaaataccagatttctt

SEQ ID NO: 1010 - DNA, 25 bp, synthetic construct
  misc_feature 1..25: note = Oligonucleotide
  source 1..25: mol_type = other DNA
attggaaagcaaaaataccagattt

SEQ ID NO: 1011 - DNA, 25 bp, synthetic construct
  misc_feature 1..25: note = Oligonucleotide
  source 1..25: mol_type = other DNA
tttattggaaagcaaaaataccaga

SEQ ID NO: 1012 - DNA, 25 bp, synthetic construct
  misc_feature 1..25: note = Oligonucleotide
  source 1..25: mol_type = other DNA
ccctttattggaaagcaaaaatacc

SEQ ID NO: 1013 - DNA, 25 bp, synthetic construct
  misc_feature 1..25: note = Oligonucleotide
  source 1..25: mol_type = other DNA
atcccctttattggaaagcaaaaat

SEQ ID NO: 1014 - DNA, 25 bp, synthetic construct
  misc_feature 1..25: note = Oligonucleotide
  source 1..25: mol_type = other DNA
ttgatcccctttattggaaagcaaa

SEQ ID NO: 1015 - DNA, 25 bp, synthetic construct
  misc_feature 1..25: note = Oligonucleotide
  source 1..25: mol_type = other DNA
actttgatcccctttattggaaagc

SEQ ID NO: 1016 - DNA, 25 bp, synthetic construct
  misc_feature 1..25: note = Oligonucleotide
  source 1..25: mol_type = other DNA
attactttgatcccctttattggaa

SEQ ID NO: 1017 - DNA, 25 bp, synthetic construct
  misc_feature 1..25: note = Oligonucleotide
  source 1..25: mol_type = other DNA
accattactttgatcccctttattg

SEQ ID NO: 1018 - DNA, 25 bp, synthetic construct
  misc_feature 1..25: note = Oligonucleotide
  source 1..25: mol_type = other DNA
aaaaccattactttgatccccttta

SEQ ID NO: 1019 - DNA, 25 bp, synthetic construct
  misc_feature 1..25: note = Oligonucleotide
  source 1..25: mol_type = other DNA
agaaaaaccattactttgatcccct

SEQ ID NO: 1020 - DNA, 25 bp, synthetic construct
  misc_feature 1..25: note = Oligonucleotide
  source 1..25: mol_type = other DNA
gagagaaaaaccattactttgatcc

SEQ ID NO: 1021 - DNA, 25 bp, synthetic construct
  misc_feature 1..25: note = Oligonucleotide
  source 1..25: mol_type = other DNA
actgagagaaaaaccattactttga

SEQ ID NO: 1022 - DNA, 25 bp, synthetic construct
  misc_feature 1..25: note = Oligonucleotide
  source 1..25: mol_type = other DNA
agaactgagagaaaaaccattactt

SEQ ID NO: 1023 - DNA, 25 bp, synthetic construct
  misc_feature 1..25: note = Oligonucleotide
  source 1..25: mol_type = other DNA
tagagaactgagagaaaaaccatta

SEQ ID NO: 1024 - DNA, 25 bp, synthetic construct
  misc_feature 1..25: note = Oligonucleotide
  source 1..25: mol_type = other DNA
gcttagagaactgagagaaaaacca

SEQ ID NO: 1025 - DNA, 25 bp, synthetic construct
  misc_feature 1..25: note = Oligonucleotide
  source 1..25: mol_type = other DNA
ccagcttagagaactgagagaaaaa

SEQ ID NO: 1026 - DNA, 25 bp, synthetic construct
  misc_feature 1..25: note = Oligonucleotide
  source 1..25: mol_type = other DNA
agaccagcttagagaactgagagaa

SEQ ID NO: 1027 - DNA, 25 bp, synthetic construct
  misc_feature 1..25: note = Oligonucleotide
  source 1..25: mol_type = other DNA
catagaccagcttagagaactgaga

SEQ ID NO: 1028 - DNA, 25 bp, synthetic construct
  misc_feature 1..25: note = Oligonucleotide
  source 1..25: mol_type = other DNA
taacatagaccagcttagagaactg

SEQ ID NO: 1029 - DNA, 25 bp, synthetic construct
  misc_feature 1..25: note = Oligonucleotide
  source 1..25: mol_type = other DNA
ctataacatagaccagcttagagaa

SEQ ID NO: 1030 - DNA, 25 bp, synthetic construct
  misc_feature 1..25: note = Oligonucleotide
  source 1..25: mol_type = other DNA
gagctataacatagaccagcttaga

SEQ ID NO: 1031 - DNA, 25 bp, synthetic construct
  misc_feature 1..25: note = Oligonucleotide
  source 1..25: mol_type = other DNA
ctagagctataacatagaccagctt

SEQ ID NO: 1032 - DNA, 25 bp, synthetic construct
  misc_feature 1..25: note = Oligonucleotide
  source 1..25: mol_type = other DNA
ctgctagagctataacatagaccag

SEQ ID NO: 1033 - DNA, 25 bp, synthetic construct
  misc_feature 1..25: note = Oligonucleotide
  source 1..25: mol_type = other DNA
atactgctagagctataacatagac

SEQ ID NO: 1034 - DNA, 25 bp, synthetic construct
  misc_feature 1..25: note = Oligonucleotide
  source 1..25: mol_type = other DNA
tccatactgctagagctataacata

SEQ ID NO: 1035 - DNA, 25 bp, synthetic construct
  misc_feature 1..25: note = Oligonucleotide
  source 1..25: mol_type = other DNA
atttccatactgctagagctataac

SEQ ID NO: 1036 - DNA, 25 bp, synthetic construct
  misc_feature 1..25: note = Oligonucleotide
  source 1..25: mol_type = other DNA
cacatttccatactgctagagctat

SEQ ID NO: 1037 - DNA, 25 bp, synthetic construct
  misc_feature 1..25: note = Oligonucleotide
  source 1..25: mol_type = other DNA
aagcacatttccatactgctagagc

SEQ ID NO: 1038 - DNA, 25 bp, synthetic construct
  misc_feature 1..25: note = Oligonucleotide
  source 1..25: mol_type = other DNA
ttaaagcacatttccatactgctag

SEQ ID NO: 1039 - DNA, 25 bp, synthetic construct
  misc_feature 1..25: note = Oligonucleotide
  source 1..25: mol_type = other DNA
attttaaagcacatttccatactgc

SEQ ID NO: 1040 - DNA, 25 bp, synthetic construct
  misc_feature 1..25: note = Oligonucleotide
  source 1..25: mol_type = other DNA
catattttaaagcacatttccatac

SEQ ID NO: 1041 - DNA, 25 bp, synthetic construct
  misc_feature 1..25: note = Oligonucleotide
  source 1..25: mol_type = other DNA
aagcatattttaaagcacatttcca

SEQ ID NO: 1042 - DNA, 25 bp, synthetic construct
  misc_feature 1..25: note = Oligonucleotide
  source 1..25: mol_type = other DNA
ggtaagcatattttaaagcacattt

SEQ ID NO: 1043 - DNA, 25 bp, synthetic construct
  misc_feature 1..25: note = Oligonucleotide
  source 1..25: mol_type = other DNA
aaaggtaagcatattttaaagcaca

SEQ ID NO: 1044 - DNA, 25 bp, synthetic construct
  misc_feature 1..25: note = Oligonucleotide
  source 1..25: mol_type = other DNA
tcaaaaggtaagcatattttaaagc

SEQ ID NO: 1045 - DNA, 25 bp, synthetic construct
  misc_feature 1..25: note = Oligonucleotide
  source 1..25: mol_type = other DNA
cattcaaaaggtaagcatattttaa

SEQ ID NO: 1046 - DNA, 25 bp, synthetic construct
  misc_feature 1..25: note = Oligonucleotide
  source 1..25: mol_type = other DNA
gatcattcaaaaggtaagcatattt

SEQ ID NO: 1047 - DNA, 25 bp, synthetic construct
  misc_feature 1..25: note = Oligonucleotide
  source 1..25: mol_type = other DNA
catgatcattcaaaaggtaagcata

SEQ ID NO: 1048 - DNA, 25 bp, synthetic construct
  misc_feature 1..25: note = Oligonucleotide
  source 1..25: mol_type = other DNA
agccatgatcattcaaaaggtaagc

SEQ ID NO: 1049 - DNA, 25 bp, synthetic construct
  misc_feature 1..25: note = Oligonucleotide
  source 1..25: mol_type = other DNA
tatagccatgatcattcaaaaggta

SEQ ID NO: 1050 - DNA, 25 bp, synthetic construct
  misc_feature 1..25: note = Oligonucleotide
  source 1..25: mol_type = other DNA
acatatagccatgatcattcaaaag

SEQ ID NO: 1051 - DNA, 25 bp, synthetic construct
  misc_feature 1..25: note = Oligonucleotide
  source 1..25: mol_type = other DNA
acaacatatagccatgatcattcaa

SEQ ID NO: 1052 - DNA, 25 bp, synthetic construct
  misc_feature 1..25: note = Oligonucleotide
  source 1..25: mol_type = other DNA
tcaacaacatatagccatgatcatt

SEQ ID NO: 1053 - DNA, 25 bp, synthetic construct
  misc_feature 1..25: note = Oligonucleotide
  source 1..25: mol_type = other DNA
atctcaacaacatatagccatgatc

SEQ ID NO: 1054 - DNA, 25 bp, synthetic construct
  misc_feature 1..25: note = Oligonucleotide
  source 1..25: mol_type = other DNA
aatatctcaacaacatatagccatg

SEQ ID NO: 1055 - DNA, 25 bp, synthetic construct
  misc_feature 1..25: note = Oligonucleotide
  source 1..25: mol_type = other DNA
tcaaatatctcaacaacatatagcc

SEQ ID NO: 1056 - DNA, 25 bp, synthetic construct
  misc_feature 1..25: note = Oligonucleotide
  source 1..25: mol_type = other DNA
gtttcaaatatctcaacaacatata

SEQ ID NO: 1057 - DNA, 25 bp, synthetic construct
  misc_feature 1..25: note = Oligonucleotide
  source 1..25: mol_type = other DNA
taagtttcaaatatctcaacaacat

SEQ ID NO: 1058 - DNA, 25 bp, synthetic construct
  misc_feature 1..25: note = Oligonucleotide
  source 1..25: mol_type = other DNA
aggtaagtttcaaatatctcaacaa

SEQ ID NO: 1059 - DNA, 25 bp, synthetic construct
  misc_feature 1..25: note = Oligonucleotide
  source 1..25: mol_type = other DNA
acaaggtaagtttcaaatatctcaa

SEQ ID NO: 1060 - DNA, 25 bp, synthetic construct
  misc_feature 1..25: note = Oligonucleotide
  source 1..25: mol_type = other DNA
aaaacaaggtaagtttcaaatatct

SEQ ID NO: 1061 - DNA, 25 bp, synthetic construct
  misc_feature 1..25: note = Oligonucleotide
  source 1..25: mol_type = other DNA
gtgaaaacaaggtaagtttcaaata

SEQ ID NO: 1062 - DNA, 25 bp, synthetic construct
  misc_feature 1..25: note = Oligonucleotide
  source 1..25: mol_type = other DNA
caagtgaaaacaaggtaagtttcaa

SEQ ID NO: 1063 - DNA, 25 bp, synthetic construct
  misc_feature 1..25: note = Oligonucleotide
  source 1..25: mol_type = other DNA
gcacaagtgaaaacaaggtaagttt

SEQ ID NO: 1064 - DNA, 25 bp, synthetic construct
  misc_feature 1..25: note = Oligonucleotide
  source 1..25: mol_type = other DNA
agtgcacaagtgaaaacaaggtaag

SEQ ID NO: 1065 - DNA, 25 bp, synthetic construct
  misc_feature 1..25: note = Oligonucleotide
  source 1..25: mol_type = other DNA
cacagtgcacaagtgaaaacaaggt

SEQ ID NO: 1066 - DNA, 25 bp, synthetic construct
  misc_feature 1..25: note = Oligonucleotide
  source 1..25: mol_type = other DNA
attcacagtgcacaagtgaaaacaa

SEQ ID NO: 1067 - DNA, 25 bp, synthetic construct
  misc_feature 1..25: note = Oligonucleotide
  source 1..25: mol_type = other DNA
ttcattcacagtgcacaagtgaaaa

SEQ ID NO: 1068 - DNA, 25 bp, synthetic construct
  misc_feature 1..25: note = Oligonucleotide
  source 1..25: mol_type = other DNA
aagttcattcacagtgcacaagtga

SEQ ID NO: 1069 - DNA, 25 bp, synthetic construct
  misc_feature 1..25: note = Oligonucleotide
  source 1..25: mol_type = other DNA
acaaagttcattcacagtgcacaag

SEQ ID NO: 1070 - DNA, 25 bp, synthetic construct
  misc_feature 1..25: note = Oligonucleotide
  source 1..25: mol_type = other DNA
aatacaaagttcattcacagtgcac

SEQ ID NO: 1071 - DNA, 25 bp, synthetic construct
  misc_feature 1..25: note = Oligonucleotide
  source 1..25: mol_type = other DNA
aataatacaaagttcattcacagtg

SEQ ID NO: 1072 - DNA, 25 bp, synthetic construct
  misc_feature 1..25: note = Oligonucleotide
  source 1..25: mol_type = other DNA
aaaaataatacaaagttcattcaca

SEQ ID NO: 1073 - DNA, 25 bp, synthetic construct
  misc_feature 1..25: note = Oligonucleotide
  source 1..25: mol_type = other DNA
taaaaaaataatacaaagttcattc

SEQ ID NO: 1074 - DNA, 25 bp, synthetic construct
  misc_feature 1..25: note = Oligonucleotide
  source 1..25: mol_type = other DNA
ttttaaaaaaataatacaaagttca

SEQ ID NO: 1075 - DNA, 25 bp, synthetic construct
  misc_feature 1..25: note = Oligonucleotide
  source 1..25: mol_type = other DNA
aggttttaaaaaaataatacaaagt

SEQ ID NO: 1076 - DNA, 25 bp, synthetic construct
  misc_feature 1..25: note = Oligonucleotide
  source 1..25: mol_type = other DNA
tgaaggttttaaaaaaataatacaa

SEQ ID NO: 1077 - DNA, 25 bp, synthetic construct
  misc_feature 1..25: note = Oligonucleotide
  source 1..25: mol_type = other DNA
atgtgaaggttttaaaaaaataata

SEQ ID NO: 1078 - DNA, 25 bp, synthetic construct
  misc_feature 1..25: note = Oligonucleotide
  source 1..25: mol_type = other DNA
gtaatgtgaaggttttaaaaaaata

SEQ ID NO: 1079 - DNA, 25 bp, synthetic construct
  misc_feature 1..25: note = Oligonucleotide
  source 1..25: mol_type = other DNA
cacgtaatgtgaaggttttaaaaaa

SEQ ID NO: 1080 - DNA, 25 bp, synthetic construct
  misc_feature 1..25: note = Oligonucleotide
  source 1..25: mol_type = other DNA
ctacacgtaatgtgaaggttttaaa

SEQ ID NO: 1081 - DNA, 25 bp, synthetic construct
  misc_feature 1..25: note = Oligonucleotide
  source 1..25: mol_type = other DNA
tatctacacgtaatgtgaaggtttt

SEQ ID NO: 1082 - DNA, 25 bp, synthetic construct
  misc_feature 1..25: note = Oligonucleotide
  source 1..25: mol_type = other DNA
taatatctacacgtaatgtgaaggt

SEQ ID NO: 1083 - DNA, 25 bp, synthetic construct
  misc_feature 1..25: note = Oligonucleotide
  source 1..25: mol_type = other DNA
caataatatctacacgtaatgtgaa

SEQ ID NO: 1084 - DNA, 25 bp, synthetic construct
  misc_feature 1..25: note = Oligonucleotide
  source 1..25: mol_type = other DNA
ttgcaataatatctacacgtaatgt

SEQ ID NO: 1085 - DNA, 25 bp, synthetic construct
  misc_feature 1..25: note = Oligonucleotide
  source 1..25: mol_type = other DNA
aagttgcaataatatctacacgtaa

SEQ ID NO: 1086 - DNA, 25 bp, synthetic construct
  misc_feature 1..25: note = Oligonucleotide
  source 1..25: mol_type = other DNA
tataagttgcaataatatctacacg

SEQ ID NO: 1087 - DNA, 25 bp, synthetic construct
  misc_feature 1..25: note = Oligonucleotide
  source 1..25: mol_type = other DNA
aaatataagttgcaataatatctac

SEQ ID NO: 1088 - DNA, 25 bp, synthetic construct
  misc_feature 1..25: note = Oligonucleotide
  source 1..25: mol_type = other DNA
gcaaaatataagttgcaataatatc

SEQ ID NO: 1089 - DNA, 25 bp, synthetic construct
  misc_feature 1..25: note = Oligonucleotide
  source 1..25: mol_type = other DNA
caggcaaaatataagttgcaataat

SEQ ID NO: 1090 - DNA, 25 bp, synthetic construct
  misc_feature 1..25: note = Oligonucleotide
  source 1..25: mol_type = other DNA
gctcaggcaaaatataagttgcaat

SEQ ID NO: 1091 - DNA, 25 bp, synthetic construct
  misc_feature 1..25: note = Oligonucleotide
  source 1..25: mol_type = other DNA
caagctcaggcaaaatataagttgc

SEQ ID NO: 1092 - DNA, 25 bp, synthetic construct
  misc_feature 1..25: note = Oligonucleotide
  source 1..25: mol_type = other DNA
gatcaagctcaggcaaaatataagt

SEQ ID NO: 1093 - DNA, 25 bp, synthetic construct
  misc_feature 1..25: note = Oligonucleotide
  source 1..25: mol_type = other DNA
tttgatcaagctcaggcaaaatata

SEQ ID NO: 1094 - DNA, 25 bp, synthetic construct
  misc_feature 1..25: note = Oligonucleotide
  source 1..25: mol_type = other DNA
acctttgatcaagctcaggcaaaat

SEQ ID NO: 1095 - DNA, 25 bp, synthetic construct
  misc_feature 1..25: note = Oligonucleotide
  source 1..25: mol_type = other DNA
atgacctttgatcaagctcaggcaa

SEQ ID NO: 1096 - DNA, 25 bp, synthetic construct
  misc_feature 1..25: note = Oligonucleotide
  source 1..25: mol_type = other DNA
caaatgacctttgatcaagctcagg

SEQ ID NO: 1097 - DNA, 25 bp, synthetic construct
  misc_feature 1..25: note = Oligonucleotide
  source 1..25: mol_type = other DNA
acacaaatgacctttgatcaagctc

SEQ ID NO: 1098 - DNA, 25 bp, synthetic construct
  misc_feature 1..25: note = Oligonucleotide
  source 1..25: mol_type = other DNA
tctacacaaatgacctttgatcaag

SEQ ID NO: 1099 - DNA, 25 bp, synthetic construct
  misc_feature 1..25: note = Oligonucleotide
  source 1..25: mol_type = other DNA
tcatctacacaaatgacctttgatc

SEQ ID NO: 1100 - DNA, 25 bp, synthetic construct
  misc_feature 1..25: note = Oligonucleotide
  source 1..25: mol_type = other DNA
tactcatctacacaaatgacctttg

SEQ ID NO: 1101 - DNA, 25 bp, synthetic construct
  misc_feature 1..25: note = Oligonucleotide
  source 1..25: mol_type = other DNA
aattactcatctacacaaatgacct

SEQ ID NO: 1102 - DNA, 25 bp, synthetic construct
  misc_feature 1..25: note = Oligonucleotide
  source 1..25: mol_type = other DNA
tttaattactcatctacacaaatga

SEQ ID NO: 1103 - DNA, 25 bp, synthetic construct
  misc_feature 1..25: note = Oligonucleotide
  source 1..25: mol_type = other DNA
ttttttaattactcatctacacaaa

SEQ ID NO: 1104 - DNA, 25 bp, synthetic construct
  misc_feature 1..25: note = Oligonucleotide
  source 1..25: mol_type = other DNA
atattttttaattactcatctacac

SEQ ID NO: 1105 - DNA, 25 bp, synthetic construct
  misc_feature 1..25: note = Oligonucleotide
  source 1..25: mol_type = other DNA
taaatattttttaattactcatcta

SEQ ID NO: 1106 - DNA, 25 bp, synthetic construct
  misc_feature 1..25: note = Oligonucleotide
  source 1..25: mol_type = other DNA
atttaaatattttttaattactcat

SEQ ID NO: 1107 - DNA, 25 bp, synthetic construct
  misc_feature 1..25: note = Oligonucleotide
  source 1..25: mol_type = other DNA
gtgatttaaatattttttaattact

SEQ ID NO: 1108 - DNA, 25 bp, synthetic construct
  misc_feature 1..25: note = Oligonucleotide
  source 1..25: mol_type = other DNA
aatgtgatttaaatattttttaatt

SEQ ID NO: 1109 - DNA, 25 bp, synthetic construct
  misc_feature 1..25: note = Oligonucleotide
  source 1..25: mol_type = other DNA
tataatgtgatttaaatatttttta

SEQ ID NO: 1110 - DNA, 25 bp, synthetic construct
  misc_feature 1..25: note = Oligonucleotide
  source 1..25: mol_type = other DNA
aattataatgtgatttaaatatttt

SEQ ID NO: 1111 - DNA, 25 bp, synthetic construct
  misc_feature 1..25: note = Oligonucleotide
  source 1..25: mol_type = other DNA
tagaattataatgtgatttaaatat

SEQ ID NO: 1112 - DNA, 25 bp, synthetic construct
  misc_feature 1..25: note = Oligonucleotide
  source 1..25: mol_type = other DNA
taatagaattataatgtgatttaaa

SEQ ID NO: 1113 - DNA, 25 bp, synthetic construct
  misc_feature 1..25: note = Oligonucleotide
  source 1..25: mol_type = other DNA
caataatagaattataatgtgattt

SEQ ID NO: 1114 - DNA, 25 bp, synthetic construct
  misc_feature 1..25: note = Oligonucleotide
  source 1..25: mol_type = other DNA
ctccaataatagaattataatgtga

SEQ ID NO: 1115 - DNA, 25 bp, synthetic construct
  misc_feature 1..25: note = Oligonucleotide
  source 1..25: mol_type = other DNA
gctctccaataatagaattataatg

SEQ ID NO: 1116 - DNA, 25 bp, synthetic construct
  misc_feature 1..25: note = Oligonucleotide
  source 1..25: mol_type = other DNA
gatgctctccaataatagaattata

SEQ ID NO: 1117 - DNA, 25 bp, synthetic construct
  misc_feature 1..25: note = Oligonucleotide
  source 1..25: mol_type = other DNA
aaagatgctctccaataatagaatt

SEQ ID NO: 1118 - DNA, 25 bp, synthetic construct
  misc_feature 1..25: note = Oligonucleotide
  source 1..25: mol_type = other DNA
ttaaaagatgctctccaataataga

SEQ ID NO: 1119 - DNA, 25 bp, synthetic construct
  misc_feature 1..25: note = Oligonucleotide
  source 1..25: mol_type = other DNA
aatttaaaagatgctctccaataat

SEQ ID NO: 1120 - DNA, 25 bp, synthetic construct
  misc_feature 1..25: note = Oligonucleotide
  source 1..25: mol_type = other DNA
aaaaatttaaaagatgctctccaat

SEQ ID NO: 1121 - DNA, 25 bp, synthetic construct
  misc_feature 1..25: note = Oligonucleotide
  source 1..25: mol_type = other DNA
gaaaaaaatttaaaagatgctctcc

SEQ ID NO: 1122 - DNA, 25 bp, synthetic construct
  misc_feature 1..25: note = Oligonucleotide
  source 1..25: mol_type = other DNA
acagaaaaaaatttaaaagatgctc

SEQ ID NO: 1123 - DNA, 25 bp, synthetic construct
  misc_feature 1..25: note = Oligonucleotide
  source 1..25: mol_type = other DNA
aaaacagaaaaaaatttaaaagatg

SEQ ID NO: 1124 - DNA, 25 bp, synthetic construct
  misc_feature 1..25: note = Oligonucleotide
  source 1..25: mol_type = other DNA
gttaaaacagaaaaaaatttaaaag

SEQ ID NO: 1125 - DNA, 25 bp, synthetic construct
  misc_feature 1..25: note = Oligonucleotide
  source 1..25: mol_type = other DNA
ctcgttaaaacagaaaaaaatttaa

SEQ ID NO: 1126 - DNA, 25 bp, synthetic construct
  misc_feature 1..25: note = Oligonucleotide
  source 1..25: mol_type = other DNA
tccctcgttaaaacagaaaaaaatt

SEQ ID NO: 1127 - DNA, 25 bp, synthetic construct
  misc_feature 1..25: note = Oligonucleotide
  source 1..25: mol_type = other DNA
ctttccctcgttaaaacagaaaaaa

SEQ ID NO: 1128 - DNA, 25 bp, synthetic construct
  misc_feature 1..25: note = Oligonucleotide
  source 1..25: mol_type = other DNA
tctctttccctcgttaaaacagaaa

SEQ ID NO: 1129 - DNA, 25 bp, synthetic construct
  misc_feature 1..25: note = Oligonucleotide
  source 1..25: mol_type = other DNA
gtttctctttccctcgttaaaacag

SEQ ID NO: 1130 - DNA, 25 bp, synthetic construct
  misc_feature 1..25: note = Oligonucleotide
  source 1..25: mol_type = other DNA
caggtttctctttccctcgttaaaa

SEQ ID NO: 1131 - DNA, 25 bp, synthetic construct
  misc_feature 1..25: note = Oligonucleotide
  source 1..25: mol_type = other DNA
atacaggtttctctttccctcgtta

SEQ ID NO: 1132 - DNA, 25 bp, synthetic construct
  misc_feature 1..25: note = Oligonucleotide
  source 1..25: mol_type = other DNA
ggtatacaggtttctctttccctcg

SEQ ID NO: 1133 - DNA, 25 bp, synthetic construct
  misc_feature 1..25: note = Oligonucleotide
  source 1..25: mol_type = other DNA
ctaggtatacaggtttctctttccc

SEQ ID NO: 1134 - DNA, 25 bp, synthetic construct
  misc_feature 1..25: note = Oligonucleotide
  source 1..25: mol_type = other DNA
accctaggtatacaggtttctcttt

SEQ ID NO: 1135 - DNA, 25 bp, synthetic construct
  misc_feature 1..25: note = Oligonucleotide
  source 1..25: mol_type = other DNA
atgaccctaggtatacaggtttctc

SEQ ID NO: 1136 - DNA, 25 bp, synthetic construct
  misc_feature 1..25: note = Oligonucleotide
  source 1..25: mol_type = other DNA
ataatgaccctaggtatacaggttt

SEQ ID NO: 1137 - DNA, 25 bp, synthetic construct
  misc_feature 1..25: note = Oligonucleotide
  source 1..25: mol_type = other DNA
caaataatgaccctaggtatacagg

SEQ ID NO: 1138 - DNA, 25 bp, synthetic construct
  misc_feature 1..25: note = Oligonucleotide
  source 1..25: mol_type = other DNA
ggtcaaataatgaccctaggtatac

SEQ ID NO: 1139 - DNA, 25 bp, synthetic construct
  misc_feature 1..25: note = Oligonucleotide
  source 1..25: mol_type = other DNA
tggggtcaaataatgaccctaggta

SEQ ID NO: 1140 - DNA, 25 bp, synthetic construct
  misc_feature 1..25: note = Oligonucleotide
  source 1..25: mol_type = other DNA
ctatggggtcaaataatgaccctag

SEQ ID NO: 1141 - DNA, 25 bp, synthetic construct
  misc_feature 1..25: note = Oligonucleotide
  source 1..25: mol_type = other DNA
atactatggggtcaaataatgaccc

SEQ ID NO: 1142 - DNA, 25 bp, synthetic construct
  misc_feature 1..25: note = Oligonucleotide
  source 1..25: mol_type = other DNA
gttatactatggggtcaaataatga

SEQ ID NO: 1143 - DNA, 25 bp, synthetic construct
  misc_feature 1..25: note = Oligonucleotide
  source 1..25: mol_type = other DNA
ctggttatactatggggtcaaataa

SEQ ID NO: 1144 - DNA, 25 bp, synthetic construct
  misc_feature 1..25: note = Oligonucleotide
  source 1..25: mol_type = other DNA
aatctggttatactatggggtcaaa

SEQ ID NO: 1145 - DNA, 25 bp, synthetic construct
  misc_feature 1..25: note = Oligonucleotide
  source 1..25: mol_type = other DNA
atgaatctggttatactatggggtc

SEQ ID NO: 1146 - DNA, 25 bp, synthetic construct
  misc_feature 1..25: note = Oligonucleotide
  source 1..25: mol_type = other DNA
accatgaatctggttatactatggg

SEQ ID NO: 1147 - DNA, 25 bp, synthetic construct
  misc_feature 1..25: note = Oligonucleotide
  source 1..25: mol_type = other DNA
tagaccatgaatctggttatactat

SEQ ID NO: 1148 - DNA, 25 bp, synthetic construct
  misc_feature 1..25: note = Oligonucleotide
  source 1..25: mol_type = other DNA
tgttagaccatgaatctggttatac

SEQ ID NO: 1149 - DNA, 25 bp, synthetic construct
  misc_feature 1..25: note = Oligonucleotide
  source 1..25: mol_type = other DNA
gcttgttagaccatgaatctggtta

SEQ ID NO: 1150 - DNA, 25 bp, synthetic construct
  misc_feature 1..25: note = Oligonucleotide
  source 1..25: mol_type = other DNA
agagcttgttagaccatgaatctgg

SEQ ID NO: 1151 - DNA, 25 bp, synthetic construct
  misc_feature 1..25: note = Oligonucleotide
  source 1..25: mol_type = other DNA
ctgagagcttgttagaccatgaatc

SEQ ID NO: 1152 - DNA, 25 bp, synthetic construct
  misc_feature 1..25: note = Oligonucleotide
  source 1..25: mol_type = other DNA
acactgagagcttgttagaccatga

SEQ ID NO: 1153 - DNA, 25 bp, synthetic construct
  misc_feature 1..25: note = Oligonucleotide
  source 1..25: mol_type = other DNA
gccacactgagagcttgttagacca

SEQ ID NO: 1154 - DNA, 25 bp, synthetic construct
  misc_feature 1..25: note = Oligonucleotide
  source 1..25: mol_type = other DNA
aaagccacactgagagcttgttaga

SEQ ID NO: 1155 - DNA, 25 bp, synthetic construct
  misc_feature 1..25: note = Oligonucleotide
  source 1..25: mol_type = other DNA
agaaaagccacactgagagcttgtt

SEQ ID NO: 1156 - DNA, 25 bp, synthetic construct
  misc_feature 1..25: note = Oligonucleotide
  source 1..25: mol_type = other DNA
cagagaaaagccacactgagagctt

SEQ ID NO: 1157 - DNA, 25 bp, synthetic construct
  misc_feature 1..25: note = Oligonucleotide
  source 1..25: mol_type = other DNA
attcagagaaaagccacactgagag

SEQ ID NO: 1158 - DNA, 25 bp, synthetic construct
  misc_feature 1..25: note = Oligonucleotide
  source 1..25: mol_type = other DNA
agcattcagagaaaagccacactga

SEQ ID NO: 1159 - DNA, 25 bp, synthetic construct
  misc_feature 1..25: note = Oligonucleotide
  source 1..25: mol_type = other DNA
tcaagcattcagagaaaagccacac

SEQ ID NO: 1160 - DNA, 25 bp, synthetic construct
  misc_feature 1..25: note = Oligonucleotide
  source 1..25: mol_type = other DNA
aattcaagcattcagagaaaagcca

SEQ ID NO: 1161 - DNA, 25 bp, synthetic construct
  misc_feature 1..25: note = Oligonucleotide
  source 1..25: mol_type = other DNA
tgaaattcaagcattcagagaaaag

SEQ ID NO: 1162 - DNA, 25 bp, synthetic construct
  misc_feature 1..25: note = Oligonucleotide
  source 1..25: mol_type = other DNA
atgtgaaattcaagcattcagagaa

SEQ ID NO: 1163 - DNA, 25 bp, synthetic construct
  misc_feature 1..25: note = Oligonucleotide
  source 1..25: mol_type = other DNA
ggcatgtgaaattcaagcattcaga

SEQ ID NO: 1164 - DNA, 25 bp, synthetic construct
  misc_feature 1..25: note = Oligonucleotide
  source 1..25: mol_type = other DNA
caaggcatgtgaaattcaagcattc

SEQ ID NO: 1165 - DNA, 25 bp, synthetic construct
  misc_feature 1..25: note = Oligonucleotide
  source 1..25: mol_type = other DNA
atgcaaggcatgtgaaattcaagca

SEQ ID NO: 1166 - DNA, 25 bp, synthetic construct
  misc_feature 1..25: note = Oligonucleotide
  source 1..25: mol_type = other DNA
gaaatgcaaggcatgtgaaattcaa

SEQ ID NO: 1167 - DNA, 25 bp, synthetic construct
  misc_feature 1..25: note = Oligonucleotide
  source 1..25: mol_type = other DNA
tgtgaaatgcaaggcatgtgaaatt

SEQ ID NO: 1168 - DNA, 25 bp, synthetic construct
  misc_feature 1..25: note = Oligonucleotide
  source 1..25: mol_type = other DNA
aactgtgaaatgcaaggcatgtgaa

SEQ ID NO: 1169 - DNA, 25 bp, synthetic construct
  misc_feature 1..25: note = Oligonucleotide
  source 1..25: mol_type = other DNA
tacaactgtgaaatgcaaggcatgt

SEQ ID NO: 1170 - DNA, 25 bp, synthetic construct
  misc_feature 1..25: note = Oligonucleotide
  source 1..25: mol_type = other DNA
gagtacaactgtgaaatgcaaggca

SEQ ID NO: 1171 - DNA, 25 bp, synthetic construct
  misc_feature 1..25: note = Oligonucleotide
  source 1..25: mol_type = other DNA
atggagtacaactgtgaaatgcaag

SEQ ID NO: 1172 - DNA, 25 bp, synthetic construct
  misc_feature 1..25: note = Oligonucleotide
  source 1..25: mol_type = other DNA
accatggagtacaactgtgaaatgc

SEQ ID NO: 1173 - DNA, 25 bp, synthetic construct
  misc_feature 1..25: note = Oligonucleotide
  source 1..25: mol_type = other DNA
ttgaccatggagtacaactgtgaaa

SEQ ID NO: 1174 - DNA, 25 bp, synthetic construct
  misc_feature 1..25: note = Oligonucleotide
  source 1..25: mol_type = other DNA
cggttgaccatggagtacaactgtg

SEQ ID NO: 1175 - DNA, 25 bp, synthetic construct
  misc_feature 1..25: note = Oligonucleotide
  source 1..25: mol_type = other DNA
caccggttgaccatggagtacaact

SEQ ID NO: 1176 - DNA, 25 bp, synthetic construct
  misc_feature 1..25: note = Oligonucleotide
  source 1..25: mol_type = other DNA
aagcaccggttgaccatggagtaca

SEQ ID NO: 1177 - DNA, 25 bp, synthetic construct
  misc_feature 1..25: note = Oligonucleotide
  source 1..25: mol_type = other DNA
aaaaagcaccggttgaccatggagt

SEQ ID NO: 1178 - DNA, 25 bp, synthetic construct
  misc_feature 1..25: note = Oligonucleotide
  source 1..25: mol_type = other DNA
gaaaaaaagcaccggttgaccatgg

SEQ ID NO: 1179 - DNA, 25 bp, synthetic construct
  misc_feature 1..25: note = Oligonucleotide
  source 1..25: mol_type = other DNA
tgtgaaaaaaagcaccggttgacca

SEQ ID NO: 1180 - DNA, 25 bp, synthetic construct
  misc_feature 1..25: note = Oligonucleotide
  source 1..25: mol_type = other DNA
cgatgtgaaaaaaagcaccggttga

SEQ ID NO: 1181 - DNA, 25 bp, synthetic construct
  misc_feature 1..25: note = Oligonucleotide
  source 1..25: mol_type = other DNA
ccacgatgtgaaaaaaagcaccggt

SEQ ID NO: 1182 - DNA, 25 bp, synthetic construct
  misc_feature 1..25: note = Oligonucleotide
  source 1..25: mol_type = other DNA
gtaccacgatgtgaaaaaaagcacc

SEQ ID NO: 1183 - DNA, 25 bp, synthetic construct
  misc_feature 1..25: note = Oligonucleotide
  source 1..25: mol_type = other DNA
caagtaccacgatgtgaaaaaaagc

SEQ ID NO: 1184 - DNA, 25 bp, synthetic construct
  misc_feature 1..25: note = Oligonucleotide
  source 1..25: mol_type = other DNA
tgacaagtaccacgatgtgaaaaaa

SEQ ID NO: 1185 - DNA, 25 bp, synthetic construct
  misc_feature 1..25: note = Oligonucleotide
  source 1..25: mol_type = other DNA
ttttgacaagtaccacgatgtgaaa

SEQ ID NO: 1186 - DNA, 25 bp, synthetic construct
  misc_feature 1..25: note = Oligonucleotide
  source 1..25: mol_type = other DNA
atgttttgacaagtaccacgatgtg

SEQ ID NO: 1187 - DNA, 25 bp, synthetic construct
  misc_feature 1..25: note = Oligonucleotide
  source 1..25: mol_type = other DNA
aaaatgttttgacaagtaccacgat

SEQ ID NO: 1188 - DNA, 25 bp, synthetic construct
  misc_feature 1..25: note = Oligonucleotide
  source 1..25: mol_type = other DNA
aacaaaatgttttgacaagtaccac

SEQ ID NO: 1189 - DNA, 25 bp, synthetic construct
  misc_feature 1..25: note = Oligonucleotide
  source 1..25: mol_type = other DNA
aataacaaaatgttttgacaagtac

SEQ ID NO: 1190 - DNA, 25 bp, synthetic construct
  misc_feature 1..25: note = Oligonucleotide
  source 1..25: mol_type = other DNA
gaaaataacaaaatgttttgacaag

SEQ ID NO: 1191 - DNA, 25 bp, synthetic construct
  misc_feature 1..25: note = Oligonucleotide
  source 1..25: mol_type = other DNA
aaggaaaataacaaaatgttttgac

SEQ ID NO: 1192 - DNA, 25 bp, synthetic construct
  misc_feature 1..25: note = Oligonucleotide
  source 1..25: mol_type = other DNA
accaaggaaaataacaaaatgtttt

SEQ ID NO: 1193 - DNA, 25 bp, synthetic construct
  misc_feature 1..25: note = Oligonucleotide
  source 1..25: mol_type = other DNA
tttaccaaggaaaataacaaaatgt

SEQ ID NO: 1194 - DNA, 25 bp, synthetic construct
  misc_feature 1..25: note = Oligonucleotide
  source 1..25: mol_type = other DNA
tattttaccaaggaaaataacaaaa

SEQ ID NO: 1195 - DNA, 25 bp, synthetic construct
  misc_feature 1..25: note = Oligonucleotide
  source 1..25: mol_type = other DNA
atatattttaccaaggaaaataaca

SEQ ID NO: 1196 - DNA, 25 bp, synthetic construct
  misc_feature 1..25: note = Oligonucleotide
  source 1..25: mol_type = other DNA
tttatatattttaccaaggaaaata

SEQ ID NO: 1197 - DNA, 25 bp, synthetic construct
  misc_feature 1..25: note = Oligonucleotide
  source 1..25: mol_type = other DNA
ttttttatatattttaccaaggaaa

SEQ ID NO: 1198 - DNA, 25 bp, synthetic construct
  misc_feature 1..25: note = Oligonucleotide
  source 1..25: mol_type = other DNA
accttttttatatattttaccaagg

SEQ ID NO: 1199 - DNA, 25 bp, synthetic construct
  misc_feature 1..25: note = Oligonucleotide
  source 1..25: mol_type = other DNA
aaaaccttttttatatattttacca

SEQ ID NO: 1200 - DNA, 25 bp, synthetic construct
  misc_feature 1..25: note = Oligonucleotide
  source 1..25: mol_type = other DNA
tagaaaaccttttttatatatttta

SEQ ID NO: 1201 - DNA, 25 bp, synthetic construct
  misc_feature 1..25: note = Oligonucleotide
  source 1..25: mol_type = other DNA
aattagaaaaccttttttatatatt

SEQ ID NO: 1202 - DNA, 25 bp, synthetic construct
  misc_feature 1..25: note = Oligonucleotide
  source 1..25: mol_type = other DNA
tgaaattagaaaaccttttttatat

SEQ ID NO: 1203 - DNA, 25 bp, synthetic construct
  misc_feature 1..25: note = Oligonucleotide
  source 1..25: mol_type = other DNA
aagtgaaattagaaaacctttttta

SEQ ID NO: 1204 - DNA, 25 bp, synthetic construct
  misc_feature 1..25: note = Oligonucleotide
  source 1..25: mol_type = other DNA
gcaaagtgaaattagaaaacctttt

SEQ ID NO: 1205 - DNA, 25 bp, synthetic construct
  misc_feature 1..25: note = Oligonucleotide
  source 1..25: mol_type = other DNA
gcagcaaagtgaaattagaaaacct

SEQ ID NO: 1206 - DNA, 25 bp, synthetic construct
  misc_feature 1..25: note = Oligonucleotide
  source 1..25: mol_type = other DNA
ttggcagcaaagtgaaattagaaaa

SEQ ID NO: 1207 - DNA, 25 bp, synthetic construct
  misc_feature 1..25: note = Oligonucleotide
  source 1..25: mol_type = other DNA
gccttggcagcaaagtgaaattaga

SEQ ID NO: 1208 - DNA, 25 bp, synthetic construct
  misc_feature 1..25: note = Oligonucleotide
  source 1..25: mol_type = other DNA
acagccttggcagcaaagtgaaatt

SEQ ID NO: 1209 - DNA, 25 bp, synthetic construct
  misc_feature 1..25: note = Oligonucleotide
  source 1..25: mol_type = other DNA
atgacagccttggcagcaaagtgaa

SEQ ID NO: 1210 - DNA, 25 bp, synthetic construct
  misc_feature 1..25: note = Oligonucleotide
  source 1..25: mol_type = other DNA
aaaatgacagccttggcagcaaagt

SEQ ID NO: 1211 - DNA, 25 bp, synthetic construct
  misc_feature 1..25: note = Oligonucleotide
  source 1..25: mol_type = other DNA
atgaaaatgacagccttggcagcaa

SEQ ID NO: 1212 - DNA, 25 bp, synthetic construct
  misc_feature 1..25: note = Oligonucleotide
  source 1..25: mol_type = other DNA
ttaatgaaaatgacagccttggcag

SEQ ID NO: 1213 - DNA, 25 bp, synthetic construct
  misc_feature 1..25: note = Oligonucleotide
  source 1..25: mol_type = other DNA
gcattaatgaaaatgacagccttgg

SEQ ID NO: 1214 - DNA, 25 bp, synthetic construct
  misc_feature 1..25: note = Oligonucleotide
  source 1..25: mol_type = other DNA
gcagcattaatgaaaatgacagcct

SEQ ID NO: 1215 - DNA, 25 bp, synthetic construct
  misc_feature 1..25: note = Oligonucleotide
  source 1..25: mol_type = other DNA
ttggcagcattaatgaaaatgacag

SEQ ID NO: 1216 - DNA, 25 bp, synthetic construct
  misc_feature 1..25: note = Oligonucleotide
  source 1..25: mol_type = other DNA
atgttggcagcattaatgaaaatga

SEQ ID NO: 1217 - DNA, 25 bp, synthetic construct
  misc_feature 1..25: note = Oligonucleotide
  source 1..25: mol_type = other DNA
aacatgttggcagcattaatgaaaa

SEQ ID NO: 1218 - DNA, 25 bp, synthetic construct
  misc_feature 1..25: note = Oligonucleotide
  source 1..25: mol_type = other DNA
atgaacatgttggcagcattaatga

SEQ ID NO: 1219 - DNA, 25 bp, synthetic construct
  misc_feature 1..25: note = Oligonucleotide
  source 1..25: mol_type = other DNA
catatgaacatgttggcagcattaa

SEQ ID NO: 1220 - DNA, 25 bp, synthetic construct
  misc_feature 1..25: note = Oligonucleotide
  source 1..25: mol_type = other DNA
cctcatatgaacatgttggcagcat

SEQ ID NO: 1221 - DNA, 25 bp, synthetic construct
  misc_feature 1..25: note = Oligonucleotide
  source 1..25: mol_type = other DNA
aagcctcatatgaacatgttggcag

SEQ ID NO: 1222 - DNA, 25 bp, synthetic construct
  misc_feature 1..25: note = Oligonucleotide
  source 1..25: mol_type = other DNA
agtaagcctcatatgaacatgttgg

SEQ ID NO: 1223 - DNA, 25 bp, synthetic construct
  misc_feature 1..25: note = Oligonucleotide
  source 1..25: mol_type = other DNA
cttagtaagcctcatatgaacatgt

SEQ ID NO: 1224 - DNA, 25 bp, synthetic construct
  misc_feature 1..25: note = Oligonucleotide
  source 1..25: mol_type = other DNA
cttcttagtaagcctcatatgaaca

SEQ ID NO: 1225 - DNA, 25 bp, synthetic construct
  misc_feature 1..25: note = Oligonucleotide
  source 1..25: mol_type = other DNA
taacttcttagtaagcctcatatga

SEQ ID NO: 1226 - DNA, 25 bp, synthetic construct
  misc_feature 1..25: note = Oligonucleotide
  source 1..25: mol_type = other DNA
ttataacttcttagtaagcctcata

SEQ ID NO: 1227 - DNA, 25 bp, synthetic construct
  misc_feature 1..25: note = Oligonucleotide
  source 1..25: mol_type = other DNA
tagttataacttcttagtaagcctc

SEQ ID NO: 1228 - DNA, 25 bp, synthetic construct
  misc_feature 1..25: note = Oligonucleotide
  source 1..25: mol_type = other DNA
gcttagttataacttcttagtaagc

SEQ ID NO: 1229 - DNA, 25 bp, synthetic construct
  misc_feature 1..25: note = Oligonucleotide
  source 1..25: mol_type = other DNA
aaagcttagttataacttcttagta

SEQ ID NO: 1230 - DNA, 25 bp, synthetic construct
  misc_feature 1..25: note = Oligonucleotide
  source 1..25: mol_type = other DNA
tctaaagcttagttataacttctta

SEQ ID NO: 1231 - DNA, 25 bp, synthetic construct
  misc_feature 1..25: note = Oligonucleotide
  source 1..25: mol_type = other DNA
agttctaaagcttagttataacttc

SEQ ID NO: 1232 - DNA, 25 bp, synthetic construct
  misc_feature 1..25: note = Oligonucleotide
  source 1..25: mol_type = other DNA
tccagttctaaagcttagttataac

SEQ ID NO: 1233 - DNA, 25 bp, synthetic construct
  misc_feature 1..25: note = Oligonucleotide
  source 1..25: mol_type = other DNA
tcttccagttctaaagcttagttat

SEQ ID NO: 1234 - DNA, 25 bp, synthetic construct
  misc_feature 1..25: note = Oligonucleotide
  source 1..25: mol_type = other DNA
gtctcttccagttctaaagcttagt

SEQ ID NO: 1235 - DNA, 25 bp, synthetic construct
  misc_feature 1..25: note = Oligonucleotide
  source 1..25: mol_type = other DNA
aaagtctcttccagttctaaagctt

SEQ ID NO: 1236 - DNA, 25 bp, synthetic construct
  misc_feature 1..25: note = Oligonucleotide
  source 1..25: mol_type = other DNA
attaaagtctcttccagttctaaag

SEQ ID NO: 1237 - DNA, 25 bp, synthetic construct
  misc_feature 1..25: note = Oligonucleotide
  source 1..25: mol_type = other DNA
gaaattaaagtctcttccagttcta

SEQ ID NO: 1238 - DNA, 25 bp, synthetic construct
  misc_feature 1..25: note = Oligonucleotide
  source 1..25: mol_type = other DNA
gatgaaattaaagtctcttccagtt

SEQ ID NO: 1239 - DNA, 25 bp, synthetic construct
  misc_feature 1..25: note = Oligonucleotide
  source 1..25: mol_type = other DNA
gtagatgaaattaaagtctcttcca

SEQ ID NO: 1240 - DNA, 25 bp, synthetic construct
  misc_feature 1..25: note = Oligonucleotide
  source 1..25: mol_type = other DNA
atggtagatgaaattaaagtctctt

SEQ ID NO: 1241 - DNA, 25 bp, synthetic construct
  misc_feature 1..25: note = Oligonucleotide
  source 1..25: mol_type = other DNA
cagatggtagatgaaattaaagtct

SEQ ID NO: 1242 - DNA, 25 bp, synthetic construct
  misc_feature 1..25: note = Oligonucleotide
  source 1..25: mol_type = other DNA
aatcagatggtagatgaaattaaag

SEQ ID NO: 1243 - DNA, 25 bp, synthetic construct
  misc_feature 1..25: note = Oligonucleotide
  source 1..25: mol_type = other DNA
tataatcagatggtagatgaaatta

SEQ ID NO: 1244 - DNA, 25 bp, synthetic construct
  misc_feature 1..25: note = Oligonucleotide
  source 1..25: mol_type = other DNA
gtttataatcagatggtagatgaaa

SEQ ID NO: 1245 - DNA, 25 bp, synthetic construct
  misc_feature 1..25: note = Oligonucleotide
  source 1..25: mol_type = other DNA
ggagtttataatcagatggtagatg

SEQ ID NO: 1246 - DNA, 25 bp, synthetic construct
  misc_feature 1..25: note = Oligonucleotide
  source 1..25: mol_type = other DNA
acaggagtttataatcagatggtag

SEQ ID NO: 1247 - DNA, 25 bp, synthetic construct
  misc_feature 1..25: note = Oligonucleotide
  source 1..25: mol_type = other DNA
gtaacaggagtttataatcagatgg

SEQ ID NO: 1248 - DNA, 25 bp, synthetic construct
  misc_feature 1..25: note = Oligonucleotide
  source 1..25: mol_type = other DNA
tgagtaacaggagtttataatcaga

SEQ ID NO: 1249 - DNA, 25 bp, synthetic construct
  misc_feature 1..25: note = Oligonucleotide
  source 1..25: mol_type = other DNA
aagtgagtaacaggagtttataatc

SEQ ID NO: 1250 - DNA, 25 bp, synthetic construct
  misc_feature 1..25: note = Oligonucleotide
  source 1..25: mol_type = other DNA
acaaagtgagtaacaggagtttata

SEQ ID NO: 1251 - DNA, 25 bp, synthetic construct
  misc_feature 1..25: note = Oligonucleotide
  source 1..25: mol_type = other DNA
ataacaaagtgagtaacaggagttt

SEQ ID NO: 1252 - DNA, 25 bp, synthetic construct
  misc_feature 1..25: note = Oligonucleotide
  source 1..25: mol_type = other DNA
ggaataacaaagtgagtaacaggag

SEQ ID NO: 1253 - DNA, 25 bp, synthetic construct
  misc_feature 1..25: note = Oligonucleotide
  source 1..25: mol_type = other DNA
ggaggaataacaaagtgagtaacag

SEQ ID NO: 1254 - DNA, 25 bp, synthetic construct
  misc_feature 1..25: note = Oligonucleotide
  source 1..25: mol_type = other DNA
tctggaggaataacaaagtgagtaa

SEQ ID NO: 1255 - DNA, 25 bp, synthetic construct
  misc_feature 1..25: note = Oligonucleotide
  source 1..25: mol_type = other DNA
agttctggaggaataacaaagtgag

SEQ ID NO: 1256 - DNA, 25 bp, synthetic construct
  misc_feature 1..25: note = Oligonucleotide
  source 1..25: mol_type = other DNA
caaagttctggaggaataacaaagt

SEQ ID NO: 1257 - DNA, 25 bp, synthetic construct
  misc_feature 1..25: note = Oligonucleotide
  source 1..25: mol_type = other DNA
gagcaaagttctggaggaataacaa

SEQ ID NO: 1258 - DNA, 25 bp, synthetic construct
  misc_feature 1..25: note = Oligonucleotide
  source 1..25: mol_type = other DNA
tatgagcaaagttctggaggaataa

SEQ ID NO: 1259 - DNA, 25 bp, synthetic construct
  misc_feature 1..25: note = Oligonucleotide
  source 1..25: mol_type = other DNA
atttatgagcaaagttctggaggaa

SEQ ID NO: 1260 - DNA, 25 bp, synthetic construct
  misc_feature 1..25: note = Oligonucleotide
  source 1..25: mol_type = other DNA
atcatttatgagcaaagttctggag

SEQ ID NO: 1261 - DNA, 25 bp, synthetic construct
  misc_feature 1..25: note = Oligonucleotide
  source 1..25: mol_type = other DNA
ggtatcatttatgagcaaagttctg

SEQ ID NO: 1262 - DNA, 25 bp, synthetic construct
  misc_feature 1..25: note = Oligonucleotide
  source 1..25: mol_type = other DNA
gtaggtatcatttatgagcaaagtt

SEQ ID NO: 1263 - DNA, 25 bp, synthetic construct
  misc_feature 1..25: note = Oligonucleotide
  source 1..25: mol_type = other DNA
ttagtaggtatcatttatgagcaaa

SEQ ID NO: 1264 - DNA, 25 bp, synthetic construct
  misc_feature 1..25: note = Oligonucleotide
  source 1..25: mol_type = other DNA
caattagtaggtatcatttatgagc

SEQ ID NO: 1265 - DNA, 25 bp, synthetic construct
  misc_feature 1..25: note = Oligonucleotide
  source 1..25: mol_type = other DNA
cgacaattagtaggtatcatttatg

SEQ ID NO: 1266 - DNA, 25 bp, synthetic construct
  misc_feature 1..25: note = Oligonucleotide
  source 1..25: mol_type = other DNA
gatcgacaattagtaggtatcattt

SEQ ID NO: 1267 - DNA, 25 bp, synthetic construct
  misc_feature 1..25: note = Oligonucleotide
  source 1..25: mol_type = other DNA
aatgatcgacaattagtaggtatca

SEQ ID NO: 1268 - DNA, 25 bp, synthetic construct
  misc_feature 1..25: note = Oligonucleotide
  source 1..25: mol_type = other DNA
tccaatgatcgacaattagtaggta

SEQ ID NO: 1269 - DNA, 25 bp, synthetic construct
  misc_feature 1..25: note = Oligonucleotide
  source 1..25: mol_type = other DNA
atatccaatgatcgacaattagtag

SEQ ID NO: 1270 - DNA, 25 bp, synthetic construct
  misc_feature 1..25: note = Oligonucleotide
  source 1..25: mol_type = other DNA
gacatatccaatgatcgacaattag

SEQ ID NO: 1271 - DNA, 25 bp, synthetic construct
  misc_feature 1..25: note = Oligonucleotide
  source 1..25: mol_type = other DNA
cttgacatatccaatgatcgacaat

SEQ ID NO: 1272 - DNA, 25 bp, synthetic construct
  misc_feature 1..25: note = Oligonucleotide
  source 1..25: mol_type = other DNA
taacttgacatatccaatgatcgac

SEQ ID NO: 1273 - DNA, 25 bp, synthetic construct
  misc_feature 1..25: note = Oligonucleotide
  source 1..25: mol_type = other DNA
acctaacttgacatatccaatgatc

SEQ ID NO: 1274 - DNA, 25 bp, synthetic construct
  misc_feature 1..25: note = Oligonucleotide
  source 1..25: mol_type = other DNA
gctacctaacttgacatatccaatg

SEQ ID NO: 1275 - DNA, 25 bp, synthetic construct
  misc_feature 1..25: note = Oligonucleotide
  source 1..25: mol_type = other DNA
tacgctacctaacttgacatatcca

SEQ ID NO: 1276 - DNA, 25 bp, synthetic construct
  misc_feature 1..25: note = Oligonucleotide
  source 1..25: mol_type = other DNA
ctatacgctacctaacttgacatat

SEQ ID NO: 1277 - DNA, 25 bp, synthetic construct
  misc_feature 1..25: note = Oligonucleotide
  source 1..25: mol_type = other DNA
cacctatacgctacctaacttgaca

SEQ ID NO: 1278 - DNA, 25 bp, synthetic construct
  misc_feature 1..25: note = Oligonucleotide
  source 1..25: mol_type = other DNA
gcacacctatacgctacctaacttg

SEQ ID NO: 1279 - DNA, 25 bp, synthetic construct
  misc_feature 1..25: note = Oligonucleotide
  source 1..25: mol_type = other DNA
aaggcacacctatacgctacctaac

SEQ ID NO: 1280 - DNA, 25 bp, synthetic construct
  misc_feature 1..25: note = Oligonucleotide
  source 1..25: mol_type = other DNA
aagaaggcacacctatacgctacct

SEQ ID NO: 1281 - DNA, 25 bp, synthetic construct
  misc_feature 1..25: note = Oligonucleotide
  source 1..25: mol_type = other DNA
attaagaaggcacacctatacgcta

SEQ ID NO: 1282 - DNA, 25 bp, synthetic construct
  misc_feature 1..25: note = Oligonucleotide
  source 1..25: mol_type = other DNA
ggaattaagaaggcacacctatacg

SEQ ID NO: 1283 - DNA, 25 bp, synthetic construct
  misc_feature 1..25: note = Oligonucleotide
  source 1..25: mol_type = other DNA
gaaggaattaagaaggcacacctat

SEQ ID NO: 1284 - DNA, 25 bp, synthetic construct
  misc_feature 1..25: note = Oligonucleotide
  source 1..25: mol_type = other DNA
tctgaaggaattaagaaggcacacc

SEQ ID NO: 1285 - DNA, 25 bp, synthetic construct
  misc_feature 1..25: note = Oligonucleotide
  source 1..25: mol_type = other DNA
tcttctgaaggaattaagaaggcac

SEQ ID NO: 1286 - DNA, 25 bp, synthetic construct
  misc_feature 1..25: note = Oligonucleotide
  source 1..25: mol_type = other DNA
gcatcttctgaaggaattaagaagg

SEQ ID NO: 1287 - DNA, 25 bp, synthetic construct
  misc_feature 1..25: note = Oligonucleotide
  source 1..25: mol_type = other DNA
tctgcatcttctgaaggaattaaga

SEQ ID NO: 1288 - DNA, 25 bp, synthetic construct
  misc_feature 1..25: note = Oligonucleotide
  source 1..25: mol_type = other DNA
gcctctgcatcttctgaaggaatta

SEQ ID NO: 1289 - DNA, 25 bp, synthetic construct
  misc_feature 1..25: note = Oligonucleotide
  source 1..25: mol_type = other DNA
cttgcctctgcatcttctgaaggaa

SEQ ID NO: 1290 - DNA, 25 bp, synthetic construct
  misc_feature 1..25: note = Oligonucleotide
  source 1..25: mol_type = other DNA
gttcttgcctctgcatcttctgaag

SEQ ID NO: 1291 - DNA, 25 bp, synthetic construct
  misc_feature 1..25: note = Oligonucleotide
  source 1..25: mol_type = other DNA
catgttcttgcctctgcatcttctg

SEQ ID NO: 1292 - DNA, 25 bp, synthetic construct
  misc_feature 1..25: note = Oligonucleotide
  source 1..25: mol_type = other DNA
aaacatgttcttgcctctgcatctt

SEQ ID NO: 1293 - DNA, 25 bp, synthetic construct
  misc_feature 1..25: note = Oligonucleotide
  source 1..25: mol_type = other DNA
ttgaaacatgttcttgcctctgcat

SEQ ID NO: 1294 - DNA, 25 bp, synthetic construct
  misc_feature 1..25: note = Oligonucleotide
  source 1..25: mol_type = other DNA
cgattgaaacatgttcttgcctctg

SEQ ID NO: 1295 - DNA, 25 bp, synthetic construct
  misc_feature 1..25: note = Oligonucleotide
  source 1..25: mol_type = other DNA
acacgattgaaacatgttcttgcct

SEQ ID NO: 1296 - DNA, 25 bp, synthetic construct
  misc_feature 1..25: note = Oligonucleotide
  source 1..25: mol_type = other DNA
ctaacacgattgaaacatgttcttg

SEQ ID NO: 1297 - DNA, 25 bp, synthetic construct
  misc_feature 1..25: note = Oligonucleotide
  source 1..25: mol_type = other DNA
atgctaacacgattgaaacatgttc

SEQ ID NO: 1298 - DNA, 25 bp, synthetic construct
  misc_feature 1..25: note = Oligonucleotide
  source 1..25: mol_type = other DNA
ccaatgctaacacgattgaaacatg

SEQ ID NO: 1299 - DNA, 25 bp, synthetic construct
  misc_feature 1..25: note = Oligonucleotide
  source 1..25: mol_type = other DNA
aaaccaatgctaacacgattgaaac

SEQ ID NO: 1300 - DNA, 25 bp, synthetic construct
  misc_feature 1..25: note = Oligonucleotide
  source 1..25: mol_type = other DNA
agaaaaccaatgctaacacgattga

SEQ ID NO: 1301 - DNA, 25 bp, synthetic construct
  misc_feature 1..25: note = Oligonucleotide
  source 1..25: mol_type = other DNA
taaagaaaaccaatgctaacacgat

SEQ ID NO: 1302 - DNA, 25 bp, synthetic construct
  misc_feature 1..25: note = Oligonucleotide
  source 1..25: mol_type = other DNA
tgataaagaaaaccaatgctaacac

SEQ ID NO: 1303 - DNA, 25 bp, synthetic construct
  misc_feature 1..25: note = Oligonucleotide
  source 1..25: mol_type = other DNA
cactgataaagaaaaccaatgctaa

SEQ ID NO: 1304 - DNA, 25 bp, synthetic construct
  misc_feature 1..25: note = Oligonucleotide
  source 1..25: mol_type = other DNA
tagcactgataaagaaaaccaatgc

SEQ ID NO: 1305 - DNA, 25 bp, synthetic construct
  misc_feature 1..25: note = Oligonucleotide
  source 1..25: mol_type = other DNA
tgttagcactgataaagaaaaccaa

SEQ ID NO: 1306 - DNA, 25 bp, synthetic construct
  misc_feature 1..25: note = Oligonucleotide
  source 1..25: mol_type = other DNA
gtctgttagcactgataaagaaaac

SEQ ID NO: 1307 - DNA, 25 bp, synthetic construct
  misc_feature 1..25: note = Oligonucleotide
  source 1..25: mol_type = other DNA
tgagtctgttagcactgataaagaa

SEQ ID NO: 1308 - DNA, 25 bp, synthetic construct
  misc_feature 1..25: note = Oligonucleotide
  source 1..25: mol_type = other DNA
cactgagtctgttagcactgataaa

SEQ ID NO: 1309 - DNA, 25 bp, synthetic construct
  misc_feature 1..25: note = Oligonucleotide
  source 1..25: mol_type = other DNA
tcacactgagtctgttagcactgat

SEQ ID NO: 1310 - DNA, 25 bp, synthetic construct
  misc_feature 1..25: note = Oligonucleotide
  source 1..25: mol_type = other DNA
gcctcacactgagtctgttagcact

SEQ ID NO: 1311 - DNA, 25 bp, synthetic construct
  misc_feature 1..25: note = Oligonucleotide
  source 1..25: mol_type = other DNA
ggggcctcacactgagtctgttagc

SEQ ID NO: 1312 - DNA, 25 bp, synthetic construct
  misc_feature 1..25: note = Oligonucleotide
  source 1..25: mol_type = other DNA
tatggggcctcacactgagtctgtt

SEQ ID NO: 1313 - DNA, 17 bp, synthetic construct
  misc_feature 1..17: note = Oligonucleotide
  source 1..17: mol_type = other DNA
atgagtacgattttaat

SEQ ID NO: 1314 - DNA, 17 bp, synthetic construct
  misc_feature 1..17: note = Oligonucleotide
  source 1..17: mol_type = other DNA
attatgagtacgatttt

SEQ ID NO: 1315 - DNA, 17 bp, synthetic construct
  misc_feature 1..17: note = Oligonucleotide
  source 1..17: mol_type = other DNA
ctgattatgagtacgat

SEQ ID NO: 1316 - DNA, 17 bp, synthetic construct
  misc_feature 1..17: note = Oligonucleotide
  source 1..17: mol_type = other DNA
gagctgattatgagtac

SEQ ID NO: 1317 - DNA, 17 bp, synthetic construct
  misc_feature 1..17: note = Oligonucleotide
  source 1..17: mol_type = other DNA
gcagagctgattatgag

SEQ ID NO: 1318 - DNA, 17 bp, synthetic construct
  misc_feature 1..17: note = Oligonucleotide
  source 1..17: mol_type = other DNA
tatgcagagctgattat

SEQ ID NO: 1319 - DNA, 17 bp, synthetic construct
  misc_feature 1..17: note = Oligonucleotide
  source 1..17: mol_type = other DNA
atgtatgcagagctgat

SEQ ID NO: 1320 - DNA, 17 bp, synthetic construct
  misc_feature 1..17: note = Oligonucleotide
  source 1..17: mol_type = other DNA
cagatgtatgcagagct

SEQ ID NO: 1321 - DNA, 17 bp, synthetic construct
  misc_feature 1..17: note = Oligonucleotide
  source 1..17: mol_type = other DNA
cttcagatgtatgcaga

SEQ ID NO: 1322 - DNA, 17 bp, synthetic construct
  misc_feature 1..17: note = Oligonucleotide
  source 1..17: mol_type = other DNA
gttcttcagatgtatgc

SEQ ID NO: 1323 - DNA, 17 bp, synthetic construct
  misc_feature 1..17: note = Oligonucleotide
  source 1..17: mol_type = other DNA
tttgttcttcagatgta

SEQ ID NO: 1324 - DNA, 17 bp, synthetic construct
  misc_feature 1..17: note = Oligonucleotide
  source 1..17: mol_type = other DNA
gtttttgttcttcagat

SEQ ID NO: 1325 - DNA, 17 bp, synthetic construct
  misc_feature 1..17: note = Oligonucleotide
  source 1..17: mol_type = other DNA
gatgtttttgttcttca

SEQ ID NO: 1326 - DNA, 17 bp, synthetic construct
  misc_feature 1..17: note = Oligonucleotide
  source 1..17: mol_type = other DNA
gttgatgtttttgttct

SEQ ID NO: 1327 - DNA, 17 bp, synthetic construct
  misc_feature 1..17: note = Oligonucleotide
  source 1..17: mol_type = other DNA
gacgttgatgtttttgt

SEQ ID NO: 1328 - DNA, 17 bp, synthetic construct
  misc_feature 1..17: note = Oligonucleotide
  source 1..17: mol_type = other DNA
aaagacgttgatgtttt

SEQ ID NO: 1329 - DNA, 17 bp, synthetic construct
  misc_feature 1..17: note = Oligonucleotide
  source 1..17: mol_type = other DNA
acaaaagacgttgatgt

SEQ ID NO: 1330 - DNA, 17 bp, synthetic construct
  misc_feature 1..17: note = Oligonucleotide
  source 1..17: mol_type = other DNA
tggacaaaagacgttga

SEQ ID NO: 1331 - DNA, 17 bp, synthetic construct
  misc_feature 1..17: note = Oligonucleotide
  source 1..17: mol_type = other DNA
ggctggacaaaagacgt

SEQ ID NO: 1332 - DNA, 17 bp, synthetic construct
  misc_feature 1..17: note = Oligonucleotide
  source 1..17: mol_type = other DNA
agaggctggacaaaaga

SEQ ID NO: 1333 - DNA, 17 bp, synthetic construct
  misc_feature 1..17: note = Oligonucleotide
  source 1..17: mol_type = other DNA
aaaagaggctggacaaa

SEQ ID NO: 1334 - DNA, 17 bp, synthetic construct
  misc_feature 1..17: note = Oligonucleotide
  source 1..17: mol_type = other DNA
agaaaaagaggctggac

SEQ ID NO: 1335 - DNA, 17 bp, synthetic construct
  misc_feature 1..17: note = Oligonucleotide
  source 1..17: mol_type = other DNA
agaagaaaaagaggctg

SEQ ID NO: 1336 - DNA, 17 bp, synthetic construct
  misc_feature 1..17: note = Oligonucleotide
  source 1..17: mol_type = other DNA
agcagaagaaaaagagg

SEQ ID NO: 1337 - DNA, 17 bp, synthetic construct
  misc_feature 1..17: note = Oligonucleotide
  source 1..17: mol_type = other DNA
aacagcagaagaaaaag

SEQ ID NO: 1338 - DNA, 17 bp, synthetic construct
  misc_feature 1..17: note = Oligonucleotide
  source 1..17: mol_type = other DNA
tggaacagcagaagaaa

SEQ ID NO: 1339 - DNA, 17 bp, synthetic construct
  misc_feature 1..17: note = Oligonucleotide
  source 1..17: mol_type = other DNA
aggtggaacagcagaag

SEQ ID NO: 1340 - DNA, 17 bp, synthetic construct
  misc_feature 1..17: note = Oligonucleotide
  source 1..17: mol_type = other DNA
gaaaggtggaacagcag

SEQ ID NO: 1341 - DNA, 17 bp, synthetic construct
  misc_feature 1..17: note = Oligonucleotide
  source 1..17: mol_type = other DNA
ttagaaaggtggaacag

SEQ ID NO: 1342 - DNA, 17 bp, synthetic construct
  misc_feature 1..17: note = Oligonucleotide
  source 1..17: mol_type = other DNA
tgtttagaaaggtggaa

SEQ ID NO: 1343 - DNA, 17 bp, synthetic construct
  misc_feature 1..17: note = Oligonucleotide
  source 1..17: mol_type = other DNA
gtatgtttagaaaggtg

SEQ ID NO: 1344 - DNA, 17 bp, synthetic construct
  misc_feature 1..17: note = Oligonucleotide
  source 1..17: mol_type = other DNA
attgtatgtttagaaag

SEQ ID NO: 1345 - DNA, 17 bp, synthetic construct
  misc_feature 1..17: note = Oligonucleotide
  source 1..17: mol_type = other DNA
tttattgtatgtttaga

SEQ ID NO: 1346 - DNA, 17 bp, synthetic construct
  misc_feature 1..17: note = Oligonucleotide
  source 1..17: mol_type = other DNA
gactttattgtatgttt

SEQ ID NO: 1347 - DNA, 17 bp, synthetic construct
  misc_feature 1..17: note = Oligonucleotide
  source 1..17: mol_type = other DNA
catgactttattgtatg

SEQ ID NO: 1348 - DNA, 17 bp, synthetic construct
  misc_feature 1..17: note = Oligonucleotide
  source 1..17: mol_type = other DNA
tcccatgactttattgt

SEQ ID NO: 1349 - DNA, 17 bp, synthetic construct
  misc_feature 1..17: note = Oligonucleotide
  source 1..17: mol_type = other DNA
ttatcccatgactttat

SEQ ID NO: 1350 - DNA, 17 bp, synthetic construct
  misc_feature 1..17: note = Oligonucleotide
  source 1..17: mol_type = other DNA
tttttatcccatgactt

SEQ ID NO: 1351 - DNA, 17 bp, synthetic construct
  misc_feature 1..17: note = Oligonucleotide
  source 1..17: mol_type = other DNA
ttatttttatcccatga

SEQ ID NO: 1352 - DNA, 17 bp, synthetic construct
  misc_feature 1..17: note = Oligonucleotide
  source 1..17: mol_type = other DNA
cgattatttttatccca

SEQ ID NO: 1353 - DNA, 17 bp, synthetic construct
  misc_feature 1..17: note = Oligonucleotide
  source 1..17: mol_type = other DNA
catcgattatttttatc

SEQ ID NO: 1354 - DNA, 17 bp, synthetic construct
  misc_feature 1..17: note = Oligonucleotide
  source 1..17: mol_type = other DNA
atacatcgattattttt

SEQ ID NO: 1355 - DNA, 17 bp, synthetic construct
  misc_feature 1..17: note = Oligonucleotide
  source 1..17: mol_type = other DNA
aacatacatcgattatt

SEQ ID NO: 1356 - DNA, 17 bp, synthetic construct
  misc_feature 1..17: note = Oligonucleotide
  source 1..17: mol_type = other DNA
cgtaacatacatcgatt

SEQ ID NO: 1357 - DNA, 17 bp, synthetic construct
  misc_feature 1..17: note = Oligonucleotide
  source 1..17: mol_type = other DNA
gcccgtaacatacatcg

SEQ ID NO: 1358 - DNA, 17 bp, synthetic construct
  misc_feature 1..17: note = Oligonucleotide
  source 1..17: mol_type = other DNA
agcgcccgtaacataca

SEQ ID NO: 1359 - DNA, 17 bp, synthetic construct
  misc_feature 1..17: note = Oligonucleotide
  source 1..17: mol_type = other DNA
taaagcgcccgtaacat

SEQ ID NO: 1360 - DNA, 17 bp, synthetic construct
  misc_feature 1..17: note = Oligonucleotide
  source 1..17: mol_type = other DNA
ggttaaagcgcccgtaa

SEQ ID NO: 1361 - DNA, 17 bp, synthetic construct
  misc_feature 1..17: note = Oligonucleotide
  source 1..17: mol_type = other DNA
gatggttaaagcgcccg

SEQ ID NO: 1362 - DNA, 17 bp, synthetic construct
  misc_feature 1..17: note = Oligonucleotide
  source 1..17: mol_type = other DNA
gctgatggttaaagcgc

SEQ ID NO: 1363 - DNA, 17 bp, synthetic construct
  misc_feature 1..17: note = Oligonucleotide
  source 1..17: mol_type = other DNA
gcagctgatggttaaag

SEQ ID NO: 1364 - DNA, 17 bp, synthetic construct
  misc_feature 1..17: note = Oligonucleotide
  source 1..17: mol_type = other DNA
gaggcagctgatggtta

SEQ ID NO: 1365 - DNA, 17 bp, synthetic construct
  misc_feature 1..17: note = Oligonucleotide
  source 1..17: mol_type = other DNA
cgagaggcagctgatgg

SEQ ID NO: 1366 - DNA, 17 bp, synthetic construct
  misc_feature 1..17: note = Oligonucleotide
  source 1..17: mol_type = other DNA
attcgagaggcagctga

SEQ ID NO: 1367 - DNA, 17 bp, synthetic construct
  misc_feature 1..17: note = Oligonucleotide
  source 1..17: mol_type = other DNA
tccattcgagaggcagc

SEQ ID NO: 1368 - DNA, 17 bp, synthetic construct
  misc_feature 1..17: note = Oligonucleotide
  source 1..17: mol_type = other DNA
tcttccattcgagaggc

SEQ ID NO: 1369 - DNA, 17 bp, synthetic construct
  misc_feature 1..17: note = Oligonucleotide
  source 1..17: mol_type = other DNA
tgttcttccattcgaga

SEQ ID NO: 1370 - DNA, 17 bp, synthetic construct
  misc_feature 1..17: note = Oligonucleotide
  source 1..17: mol_type = other DNA
cactgttcttccattcg

SEQ ID NO: 1371 - DNA, 17 bp, synthetic construct
  misc_feature 1..17: note = Oligonucleotide
  source 1..17: mol_type = other DNA
taccactgttcttccat

SEQ ID NO: 1372 - DNA, 17 bp, synthetic construct
  misc_feature 1..17: note = Oligonucleotide
  source 1..17: mol_type = other DNA
cattaccactgttcttc

SEQ ID NO: 1373 - DNA, 17 bp, synthetic construct
  misc_feature 1..17: note = Oligonucleotide
  source 1..17: mol_type = other DNA
atccattaccactgttc

SEQ ID NO: 1374 - DNA, 17 bp, synthetic construct
  misc_feature 1..17: note = Oligonucleotide
  source 1..17: mol_type = other DNA
ttaatccattaccactg

SEQ ID NO: 1375 - DNA, 17 bp, synthetic construct
  misc_feature 1..17: note = Oligonucleotide
  source 1..17: mol_type = other DNA
atgttaatccattacca

SEQ ID NO: 1376 - DNA, 17 bp, synthetic construct
  misc_feature 1..17: note = Oligonucleotide
  source 1..17: mol_type = other DNA
aggatgttaatccatta

SEQ ID NO: 1377 - DNA, 17 bp, synthetic construct
  misc_feature 1..17: note = Oligonucleotide
  source 1..17: mol_type = other DNA
aataggatgttaatcca

SEQ ID NO: 1378 - DNA, 17 bp, synthetic construct
  misc_feature 1..17: note = Oligonucleotide
  source 1..17: mol_type = other DNA
caaaataggatgttaat

SEQ ID NO: 1379 - DNA, 17 bp, synthetic construct
  misc_feature 1..17: note = Oligonucleotide
  source 1..17: mol_type = other DNA
caacaaaataggatgtt

SEQ ID NO: 1380 - DNA, 17 bp, synthetic construct
  misc_feature 1..17: note = Oligonucleotide
  source 1..17: mol_type = other DNA
gtacaacaaaataggat

SEQ ID NO: 1381 - DNA, 17 bp, synthetic construct
  misc_feature 1..17: note = Oligonucleotide
  source 1..17: mol_type = other DNA
ttagtacaacaaaatag

SEQ ID NO: 1382 - DNA, 17 bp, synthetic construct
  misc_feature 1..17: note = Oligonucleotide
  source 1..17: mol_type = other DNA
actttagtacaacaaaa

SEQ ID NO: 1383 - DNA, 17 bp, synthetic construct
  misc_feature 1..17: note = Oligonucleotide
  source 1..17: mol_type = other DNA
gtcactttagtacaaca

SEQ ID NO: 1384 - DNA, 17 bp, synthetic construct
  misc_feature 1..17: note = Oligonucleotide
  source 1..17: mol_type = other DNA
tttgtcactttagtaca

SEQ ID NO: 1385 - DNA, 17 bp, synthetic construct
  misc_feature 1..17: note = Oligonucleotide
  source 1..17: mol_type = other DNA
cgatttgtcactttagt

SEQ ID NO: 1386 - DNA, 17 bp, synthetic construct
  misc_feature 1..17: note = Oligonucleotide
  source 1..17: mol_type = other DNA
ttccgatttgtcacttt

SEQ ID NO: 1387 - DNA, 17 bp, synthetic construct
  misc_feature 1..17: note = Oligonucleotide
  source 1..17: mol_type = other DNA
ttattccgatttgtcac

SEQ ID NO: 1388 - DNA, 17 bp, synthetic construct
  misc_feature 1..17: note = Oligonucleotide
  source 1..17: mol_type = other DNA
atattattccgatttgt

SEQ ID NO: 1389 - DNA, 17 bp, synthetic construct
  misc_feature 1..17: note = Oligonucleotide
  source 1..17: mol_type = other DNA
attatattattccgatt

SEQ ID NO: 1390 - DNA, 17 bp, synthetic construct
  misc_feature 1..17: note = Oligonucleotide
  source 1..17: mol_type = other DNA
ccaattatattattccg

SEQ ID NO: 1391 - DNA, 17 bp, synthetic construct
  misc_feature 1..17: note = Oligonucleotide
  source 1..17: mol_type = other DNA
ataccaattatattatt

SEQ ID NO: 1392 - DNA, 17 bp, synthetic construct
  misc_feature 1..17: note = Oligonucleotide
  source 1..17: mol_type = other DNA
gccataccaattatatt

SEQ ID NO: 1393 - DNA, 17 bp, synthetic construct
  misc_feature 1..17: note = Oligonucleotide
  source 1..17: mol_type = other DNA
atggccataccaattat

SEQ ID NO: 1394 - DNA, 17 bp, synthetic construct
  misc_feature 1..17: note = Oligonucleotide
  source 1..17: mol_type = other DNA
ctaatggccataccaat

SEQ ID NO: 1395 - DNA, 17 bp, synthetic construct
  misc_feature 1..17: note = Oligonucleotide
  source 1..17: mol_type = other DNA
aacctaatggccatacc

SEQ ID NO: 1396 - DNA, 17 bp, synthetic construct
  misc_feature 1..17: note = Oligonucleotide
  source 1..17: mol_type = other DNA
ctgaacctaatggccat

SEQ ID NO: 1397 - DNA, 17 bp, synthetic construct
  misc_feature 1..17: note = Oligonucleotide
  source 1..17: mol_type = other DNA
ggactgaacctaatggc

SEQ ID NO: 1398 - DNA, 17 bp, synthetic construct
  misc_feature 1..17: note = Oligonucleotide
  source 1..17: mol_type = other DNA
caaggactgaacctaat

SEQ ID NO: 1399 - DNA, 17 bp, synthetic construct
  misc_feature 1..17: note = Oligonucleotide
  source 1..17: mol_type = other DNA
cttcaaggactgaacct

SEQ ID NO: 1400 - DNA, 17 bp, synthetic construct
  misc_feature 1..17: note = Oligonucleotide
  source 1..17: mol_type = other DNA
tatcttcaaggactgaa

SEQ ID NO: 1401 - DNA, 17 bp, synthetic construct
  misc_feature 1..17: note = Oligonucleotide
  source 1..17: mol_type = other DNA
tcttatcttcaaggact

SEQ ID NO: 1402 - DNA, 17 bp, synthetic construct
  misc_feature 1..17: note = Oligonucleotide
  source 1..17: mol_type = other DNA
gtttcttatcttcaagg

SEQ ID NO: 1403 - DNA, 17 bp, synthetic construct
  misc_feature 1..17: note = Oligonucleotide
  source 1..17: mol_type = other DNA
caagtttcttatcttca

SEQ ID NO: 1404 - DNA, 17 bp, synthetic construct
  misc_feature 1..17: note = Oligonucleotide
  source 1..17: mol_type = other DNA
gaacaagtttcttatct

SEQ ID NO: 1405 - DNA, 17 bp, synthetic construct
  misc_feature 1..17: note = Oligonucleotide
  source 1..17: mol_type = other DNA
agagaacaagtttctta

SEQ ID NO: 1406 - DNA, 17 bp, synthetic construct
  misc_feature 1..17: note = Oligonucleotide
  source 1..17: mol_type = other DNA
aacagagaacaagtttc

SEQ ID NO: 1407 - DNA, 17 bp, synthetic construct
  misc_feature 1..17: note = Oligonucleotide
  source 1..17: mol_type = other DNA
acaaacagagaacaagt

SEQ ID NO: 1408 - DNA, 17 bp, synthetic construct
  misc_feature 1..17: note = Oligonucleotide
  source 1..17: mol_type = other DNA
acaacaaacagagaaca

SEQ ID NO: 1409 - DNA, 17 bp, synthetic construct
  misc_feature 1..17: note = Oligonucleotide
  source 1..17: mol_type = other DNA
aagacaacaaacagaga

SEQ ID NO: 1410 - DNA, 17 bp, synthetic construct
  misc_feature 1..17: note = Oligonucleotide
  source 1..17: mol_type = other DNA
aataagacaacaaacag

SEQ ID NO: 1411 - DNA, 17 bp, synthetic construct
  misc_feature 1..17: note = Oligonucleotide
  source 1..17: mol_type = other DNA
acaaataagacaacaaa

SEQ ID NO: 1412 - DNA, 17 bp, synthetic construct
  misc_feature 1..17: note = Oligonucleotide
  source 1..17: mol_type = other DNA
accacaaataagacaac

SEQ ID NO: 1413 - DNA, 17 bp, synthetic construct
  misc_feature 1..17: note = Oligonucleotide
  source 1..17: mol_type = other DNA
gccaccacaaataagac

SEQ ID NO: 1414 - DNA, 17 bp, synthetic construct
  misc_feature 1..17: note = Oligonucleotide
  source 1..17: mol_type = other DNA
agtgccaccacaaataa

SEQ ID NO: 1415 - DNA, 17 bp, synthetic construct
  misc_feature 1..17: note = Oligonucleotide
  source 1..17: mol_type = other DNA
acgagtgccaccacaaa

SEQ ID NO: 1416 - DNA, 17 bp, synthetic construct
  misc_feature 1..17: note = Oligonucleotide
  source 1..17: mol_type = other DNA
taaacgagtgccaccac

SEQ ID NO: 1417 - DNA, 17 bp, synthetic construct
  misc_feature 1..17: note = Oligonucleotide
  source 1..17: mol_type = other DNA
cattaaacgagtgccac

SEQ ID NO: 1418 - DNA, 17 bp, synthetic construct
  misc_feature 1..17: note = Oligonucleotide
  source 1..17: mol_type = other DNA
atccattaaacgagtgc

SEQ ID NO: 1419 - DNA, 17 bp, synthetic construct
  misc_feature 1..17: note = Oligonucleotide
  source 1..17: mol_type = other DNA
ttaatccattaaacgag

SEQ ID NO: 1420 - DNA, 17 bp, synthetic construct
  misc_feature 1..17: note = Oligonucleotide
  source 1..17: mol_type = other DNA
cagttaatccattaaac

SEQ ID NO: 1421 - DNA, 17 bp, synthetic construct
  misc_feature 1..17: note = Oligonucleotide
  source 1..17: mol_type = other DNA
cctcagttaatccatta

SEQ ID NO: 1422 - DNA, 17 bp, synthetic construct
  misc_feature 1..17: note = Oligonucleotide
  source 1..17: mol_type = other DNA
caacctcagttaatcca

SEQ ID NO: 1423 - DNA, 17 bp, synthetic construct
  misc_feature 1..17: note = Oligonucleotide
  source 1..17: mol_type = other DNA
gagcaacctcagttaat

SEQ ID NO: 1424 - DNA, 17 bp, synthetic construct
  misc_feature 1..17: note = Oligonucleotide
  source 1..17: mol_type = other DNA
attgagcaacctcagtt

SEQ ID NO: 1425 - DNA, 17 bp, synthetic construct
  misc_feature 1..17: note = Oligonucleotide
  source 1..17: mol_type = other DNA
aacattgagcaacctca

SEQ ID NO: 1426 - DNA, 17 bp, synthetic construct
  misc_feature 1..17: note = Oligonucleotide
  source 1..17: mol_type = other DNA
ctgaacattgagcaacc

SEQ ID NO: 1427 - DNA, 17 bp, synthetic construct
  misc_feature 1..17: note = Oligonucleotide
  source 1..17: mol_type = other DNA
aaactgaacattgagca

SEQ ID NO: 1428 - DNA, 17 bp, synthetic construct
  misc_feature 1..17: note = Oligonucleotide
  source 1..17: mol_type = other DNA
aagaaactgaacattga

SEQ ID NO: 1429 - DNA, 17 bp, synthetic construct
  misc_feature 1..17: note = Oligonucleotide
  source 1..17: mol_type = other DNA
gaaaagaaactgaacat

SEQ ID NO: 1430 - DNA, 17 bp, synthetic construct
  misc_feature 1..17: note = Oligonucleotide
  source 1..17: mol_type = other DNA
ctggaaaagaaactgaa

SEQ ID NO: 1431 - DNA, 17 bp, synthetic construct
  misc_feature 1..17: note = Oligonucleotide
  source 1..17: mol_type = other DNA
tttctggaaaagaaact

SEQ ID NO: 1432 - DNA, 17 bp, synthetic construct
  misc_feature 1..17: note = Oligonucleotide
  source 1..17: mol_type = other DNA
gtatttctggaaaagaa

SEQ ID NO: 1433 - DNA, 17 bp, synthetic construct
  misc_feature 1..17: note = Oligonucleotide
  source 1..17: mol_type = other DNA
attgtatttctggaaaa

SEQ ID NO: 1434 - DNA, 17 bp, synthetic construct
  misc_feature 1..17: note = Oligonucleotide
  source 1..17: mol_type = other DNA
agcattgtatttctgga

SEQ ID NO: 1435 - DNA, 17 bp, synthetic construct
  misc_feature 1..17: note = Oligonucleotide
  source 1..17: mol_type = other DNA
cctagcattgtatttct

SEQ ID NO: 1436 - DNA, 17 bp, synthetic construct
  misc_feature 1..17: note = Oligonucleotide
  source 1..17: mol_type = other DNA
acacctagcattgtatt

SEQ ID NO: 1437 - DNA, 17 bp, synthetic construct
  misc_feature 1..17: note = Oligonucleotide
  source 1..17: mol_type = other DNA
aaaacacctagcattgt

SEQ ID NO: 1438 - DNA, 17 bp, synthetic construct
  misc_feature 1..17: note = Oligonucleotide
  source 1..17: mol_type = other DNA
ttcaaaacacctagcat

SEQ ID NO: 1439 - DNA, 17 bp, synthetic construct
  misc_feature 1..17: note = Oligonucleotide
  source 1..17: mol_type = other DNA
tatttcaaaacacctag

SEQ ID NO: 1440 - DNA, 17 bp, synthetic construct
  misc_feature 1..17: note = Oligonucleotide
  source 1..17: mol_type = other DNA
ttttatttcaaaacacc

SEQ ID NO: 1441 - DNA, 17 bp, synthetic construct
  misc_feature 1..17: note = Oligonucleotide
  source 1..17: mol_type = other DNA
aagttttatttcaaaac

SEQ ID NO: 1442 - DNA, 17 bp, synthetic construct
  misc_feature 1..17: note = Oligonucleotide
  source 1..17: mol_type = other DNA
tataagttttatttcaa

SEQ ID NO: 1443 - DNA, 17 bp, synthetic construct
  misc_feature 1..17: note = Oligonucleotide
  source 1..17: mol_type = other DNA
ctatataagttttattt

SEQ ID NO: 1444 - DNA, 17 bp, synthetic construct
  misc_feature 1..17: note = Oligonucleotide
  source 1..17: mol_type = other DNA
ttgctatataagtttta

SEQ ID NO: 1445 - DNA, 17 bp, synthetic construct
  misc_feature 1..17: note = Oligonucleotide
  source 1..17: mol_type = other DNA
caattgctatataagtt

SEQ ID NO: 1446 - DNA, 17 bp, synthetic construct
  misc_feature 1..17: note = Oligonucleotide
  source 1..17: mol_type = other DNA
aaacaattgctatataa

SEQ ID NO: 1447 - DNA, 17 bp, synthetic construct
  misc_feature 1..17: note = Oligonucleotide
  source 1..17: mol_type = other DNA
tttaaacaattgctata

SEQ ID NO: 1448 - DNA, 17 bp, synthetic construct
  misc_feature 1..17: note = Oligonucleotide
  source 1..17: mol_type = other DNA
aactttaaacaattgct

SEQ ID NO: 1449 - DNA, 17 bp, synthetic construct
  misc_feature 1..17: note = Oligonucleotide
  source 1..17: mol_type = other DNA
gataactttaaacaatt

SEQ ID NO: 1450 - DNA, 17 bp, synthetic construct
  misc_feature 1..17: note = Oligonucleotide
  source 1..17: mol_type = other DNA
attgataactttaaaca

SEQ ID NO: 1451 - DNA, 17 bp, synthetic construct
  misc_feature 1..17: note = Oligonucleotide
  source 1..17: mol_type = other DNA
acaattgataactttaa

SEQ ID NO: 1452 - DNA, 17 bp, synthetic construct
  misc_feature 1..17: note = Oligonucleotide
  source 1..17: mol_type = other DNA
tatacaattgataactt

SEQ ID NO: 1453 - DNA, 17 bp, synthetic construct
  misc_feature 1..17: note = Oligonucleotide
  source 1..17: mol_type = other DNA
ttatatacaattgataa

SEQ ID NO: 1454 - DNA, 17 bp, synthetic construct
  misc_feature 1..17: note = Oligonucleotide
  source 1..17: mol_type = other DNA
attttatatacaattga

SEQ ID NO: 1455 - DNA, 17 bp, synthetic construct
  misc_feature 1..17: note = Oligonucleotide
  source 1..17: mol_type = other DNA
gtgattttatatacaat

SEQ ID NO: 1456 - DNA, 17 bp, synthetic construct
  misc_feature 1..17: note = Oligonucleotide
  source 1..17: mol_type = other DNA
actgtgattttatatac

SEQ ID NO: 1457 - DNA, 17 bp, synthetic construct
  misc_feature 1..17: note = Oligonucleotide
  source 1..17: mol_type = other DNA
gctactgtgattttata

SEQ ID NO: 1458 - DNA, 17 bp, synthetic construct
  misc_feature 1..17: note = Oligonucleotide
  source 1..17: mol_type = other DNA
caggctactgtgatttt

SEQ ID NO: 1459 - DNA, 17 bp, synthetic construct
  misc_feature 1..17: note = Oligonucleotide
  source 1..17: mol_type = other DNA
tagcaggctactgtgat

SEQ ID NO: 1460 - DNA, 17 bp, synthetic construct
  misc_feature 1..17: note = Oligonucleotide
  source 1..17: mol_type = other DNA
atttagcaggctactgt

SEQ ID NO: 1461 - DNA, 17 bp, synthetic construct
  misc_feature 1..17: note = Oligonucleotide
  source 1..17: mol_type = other DNA
atgatttagcaggctac

SEQ ID NO: 1462 - DNA, 17 bp, synthetic construct
  misc_feature 1..17: note = Oligonucleotide
  source 1..17: mol_type = other DNA
acaatgatttagcaggc

SEQ ID NO: 1463 - DNA, 17 bp, synthetic construct
  misc_feature 1..17: note = Oligonucleotide
  source 1..17: mol_type = other DNA
catacaatgatttagca

SEQ ID NO: 1464 - DNA, 17 bp, synthetic construct
  misc_feature 1..17: note = Oligonucleotide
  source 1..17: mol_type = other DNA
acacatacaatgattta

SEQ ID NO: 1465 - DNA, 17 bp, synthetic construct
  misc_feature 1..17: note = Oligonucleotide
  source 1..17: mol_type = other DNA
cagacacatacaatgat

SEQ ID NO: 1466 - DNA, 17 bp, synthetic construct
  misc_feature 1..17: note = Oligonucleotide
  source 1..17: mol_type = other DNA
ctacagacacatacaat

SEQ ID NO: 1467 - DNA, 17 bp, synthetic construct
  misc_feature 1..17: note = Oligonucleotide
  source 1..17: mol_type = other DNA
atactacagacacatac

SEQ ID NO: 1468 - DNA, 17 bp, synthetic construct
  misc_feature 1..17: note = Oligonucleotide
  source 1..17: mol_type = other DNA
agaatactacagacaca

SEQ ID NO: 1469 - DNA, 17 bp, synthetic construct
  misc_feature 1..17: note = Oligonucleotide
  source 1..17: mol_type = other DNA
aatagaatactacagac

SEQ ID NO: 1470 - DNA, 17 bp, synthetic construct
  misc_feature 1..17: note = Oligonucleotide
  source 1..17: mol_type = other DNA
gggaatagaatactaca

SEQ ID NO: 1471 - DNA, 17 bp, synthetic construct
  misc_feature 1..17: note = Oligonucleotide
  source 1..17: mol_type = other DNA
tctgggaatagaatact

SEQ ID NO: 1472 - DNA, 17 bp, synthetic construct
  misc_feature 1..17: note = Oligonucleotide
  source 1..17: mol_type = other DNA
gtttctgggaatagaat

SEQ ID NO: 1473 - DNA, 17 bp, synthetic construct
  misc_feature 1..17: note = Oligonucleotide
  source 1..17: mol_type = other DNA
atagtttctgggaatag

SEQ ID NO: 1474 - DNA, 17 bp, synthetic construct
  misc_feature 1..17: note = Oligonucleotide
  source 1..17: mol_type = other DNA
caaatagtttctgggaa

SEQ ID NO: 1475 - DNA, 17 bp, synthetic construct
  misc_feature 1..17: note = Oligonucleotide
  source 1..17: mol_type = other DNA
ggtcaaatagtttctgg

SEQ ID NO: 1476 - DNA, 17 bp, synthetic construct
  misc_feature 1..17: note = Oligonucleotide
  source 1..17: mol_type = other DNA
catggtcaaatagtttc

SEQ ID NO: 1477 - DNA, 17 bp, synthetic construct
  misc_feature 1..17: note = Oligonucleotide
  source 1..17: mol_type = other DNA
tatcatggtcaaatagt

SEQ ID NO: 1478 - DNA, 17 bp, synthetic construct
  misc_feature 1..17: note = Oligonucleotide
  source 1..17: mol_type = other DNA
aattatcatggtcaaat

SEQ ID NO: 1479 - DNA, 17 bp, synthetic construct
  misc_feature 1..17: note = Oligonucleotide
  source 1..17: mol_type = other DNA
ctgaattatcatggtca

SEQ ID NO: 1480 - DNA, 17 bp, synthetic construct
  misc_feature 1..17: note = Oligonucleotide
  source 1..17: mol_type = other DNA
aaactgaattatcatgg

SEQ ID NO: 1481 - DNA, 17 bp, synthetic construct
  misc_feature 1..17: note = Oligonucleotide
  source 1..17: mol_type = other DNA
tataaactgaattatca

SEQ ID NO: 1482 - DNA, 17 bp, synthetic construct
  misc_feature 1..17: note = Oligonucleotide
  source 1..17: mol_type = other DNA
gaatataaactgaatta

SEQ ID NO: 1483 - DNA, 17 bp, synthetic construct
  misc_feature 1..17: note = Oligonucleotide
  source 1..17: mol_type = other DNA
ggtgaatataaactgaa

SEQ ID NO: 1484 - DNA, 17 bp, synthetic construct
  misc_feature 1..17: note = Oligonucleotide
  source 1..17: mol_type = other DNA
tgtggtgaatataaact

SEQ ID NO: 1485 - DNA, 17 bp, synthetic construct
  misc_feature 1..17: note = Oligonucleotide
  source 1..17: mol_type = other DNA
tcatgtggtgaatataa

SEQ ID NO: 1486 - DNA, 17 bp, synthetic construct
  misc_feature 1..17: note = Oligonucleotide
  source 1..17: mol_type = other DNA
ctttcatgtggtgaata

SEQ ID NO: 1487 - DNA, 17 bp, synthetic construct
  misc_feature 1..17: note = Oligonucleotide
  source 1..17: mol_type = other DNA
tttctttcatgtggtga

SEQ ID NO: 1488 - DNA, 17 bp, synthetic construct
  misc_feature 1..17: note = Oligonucleotide
  source 1..17: mol_type = other DNA
atttttctttcatgtgg

SEQ ID NO: 1489 - DNA, 17 bp, synthetic construct
  misc_feature 1..17: note = Oligonucleotide
  source 1..17: mol_type = other DNA
cccatttttctttcatg

SEQ ID NO: 1490 - DNA, 17 bp, synthetic construct
  misc_feature 1..17: note = Oligonucleotide
  source 1..17: mol_type = other DNA
ttacccatttttctttc

SEQ ID NO: 1491 - DNA, 17 bp, synthetic construct
  misc_feature 1..17: note = Oligonucleotide
  source 1..17: mol_type = other DNA
ctgttacccatttttct

SEQ ID NO: 1492 - DNA, 17 bp, synthetic construct
  misc_feature 1..17: note = Oligonucleotide
  source 1..17: mol_type = other DNA
cttctgttacccatttt

SEQ ID NO: 1493 - DNA, 17 bp, synthetic construct
  misc_feature 1..17: note = Oligonucleotide
  source 1..17: mol_type = other DNA
gttcttctgttacccat

SEQ ID NO: 1494 - DNA, 17 bp, synthetic construct
  misc_feature 1..17: note = Oligonucleotide
  source 1..17: mol_type = other DNA
agggttcttctgttacc

SEQ ID NO: 1495 - DNA, 17 bp, synthetic construct
  misc_feature 1..17: note = Oligonucleotide
  source 1..17: mol_type = other DNA
ttaagggttcttctgtt

SEQ ID NO: 1496 - DNA, 17 bp, synthetic construct
  misc_feature 1..17: note = Oligonucleotide
  source 1..17: mol_type = other DNA
gttttaagggttcttct

SEQ ID NO: 1497 - DNA, 17 bp, synthetic construct
  misc_feature 1..17: note = Oligonucleotide
  source 1..17: mol_type = other DNA
cctgttttaagggttct

SEQ ID NO: 1498 - DNA, 17 bp, synthetic construct
  misc_feature 1..17: note = Oligonucleotide
  source 1..17: mol_type = other DNA
taacctgttttaagggt

SEQ ID NO: 1499 - DNA, 17 bp, synthetic construct
  misc_feature 1..17: note = Oligonucleotide
  source 1..17: mol_type = other DNA
aattaacctgttttaag

SEQ ID NO: 1500 - DNA, 17 bp, synthetic construct
  misc_feature 1..17: note = Oligonucleotide
  source 1..17: mol_type = other DNA
ccaaattaacctgtttt

SEQ ID NO: 1501 - DNA, 17 bp, synthetic construct
  misc_feature 1..17: note = Oligonucleotide
  source 1..17: mol_type = other DNA
aatccaaattaacctgt

SEQ ID NO: 1502 - DNA, 17 bp, synthetic construct
  misc_feature 1..17: note = Oligonucleotide
  source 1..17: mol_type = other DNA
tacaatccaaattaacc

SEQ ID NO: 1503 - DNA, 17 bp, synthetic construct
  misc_feature 1..17: note = Oligonucleotide
  source 1..17: mol_type = other DNA
cgttacaatccaaatta

SEQ ID NO: 1504 - DNA, 17 bp, synthetic construct
  misc_feature 1..17: note = Oligonucleotide
  source 1..17: mol_type = other DNA
gaacgttacaatccaaa

SEQ ID NO: 1505 - DNA, 17 bp, synthetic construct
  misc_feature 1..17: note = Oligonucleotide
  source 1..17: mol_type = other DNA
actgaacgttacaatcc

SEQ ID NO: 1506 - DNA, 17 bp, synthetic construct
  misc_feature 1..17: note = Oligonucleotide
  source 1..17: mol_type = other DNA
ttcactgaacgttacaa

SEQ ID NO: 1507 - DNA, 17 bp, synthetic construct
  misc_feature 1..17: note = Oligonucleotide
  source 1..17: mol_type = other DNA
tctttcactgaacgtta

SEQ ID NO: 1508 - DNA, 17 bp, synthetic construct
  misc_feature 1..17: note = Oligonucleotide
  source 1..17: mol_type = other DNA
atttctttcactgaacg

SEQ ID NO: 1509 - DNA, 17 bp, synthetic construct
  misc_feature 1..17: note = Oligonucleotide
  source 1..17: mol_type = other DNA
gaaatttctttcactga

SEQ ID NO: 1510 - DNA, 17 bp, synthetic construct
  misc_feature 1..17: note = Oligonucleotide
  source 1..17: mol_type = other DNA
gttgaaatttctttcac

SEQ ID NO: 1511 - DNA, 17 bp, synthetic construct
  misc_feature 1..17: note = Oligonucleotide
  source 1..17: mol_type = other DNA
agggttgaaatttcttt

SEQ ID NO: 1512 - DNA, 17 bp, synthetic construct
  misc_feature 1..17: note = Oligonucleotide
  source 1..17: mol_type = other DNA
tgaagggttgaaatttc

SEQ ID NO: 1513 - DNA, 17 bp, synthetic construct
  misc_feature 1..17: note = Oligonucleotide
  source 1..17: mol_type = other DNA
ctatgaagggttgaaat

SEQ ID NO: 1514 - DNA, 17 bp, synthetic construct
  misc_feature 1..17: note = Oligonucleotide
  source 1..17: mol_type = other DNA
tggctatgaagggttga

SEQ ID NO: 1515 - DNA, 17 bp, synthetic construct
  misc_feature 1..17: note = Oligonucleotide
  source 1..17: mol_type = other DNA
cgctggctatgaagggt

SEQ ID NO: 1516 - DNA, 17 bp, synthetic construct
  misc_feature 1..17: note = Oligonucleotide
  source 1..17: mol_type = other DNA
cttcgctggctatgaag

SEQ ID NO: 1517 - DNA, 17 bp, synthetic construct
  misc_feature 1..17: note = Oligonucleotide
  source 1..17: mol_type = other DNA
tttcttcgctggctatg

SEQ ID NO: 1518 - DNA, 17 bp, synthetic construct
  misc_feature 1..17: note = Oligonucleotide
  source 1..17: mol_type = other DNA
aaatttcttcgctggct

SEQ ID NO: 1519 - DNA, 17 bp, synthetic construct
  misc_feature 1..17: note = Oligonucleotide
  source 1..17: mol_type = other DNA
ggcaaatttcttcgctg

SEQ ID NO: 1520 - DNA, 17 bp, synthetic construct
  misc_feature 1..17: note = Oligonucleotide
  source 1..17: mol_type = other DNA
caaggcaaatttcttcg

SEQ ID NO: 1521 - DNA, 17 bp, synthetic construct
  misc_feature 1..17: note = Oligonucleotide
  source 1..17: mol_type = other DNA
ttccaaggcaaatttct

SEQ ID NO: 1522 - DNA, 17 bp, synthetic construct
  misc_feature 1..17: note = Oligonucleotide
  source 1..17: mol_type = other DNA
ggcttccaaggcaaatt

SEQ ID NO: 1523 - DNA, 17 bp, synthetic construct
  misc_feature 1..17: note = Oligonucleotide
  source 1..17: mol_type = other DNA
cttggcttccaaggcaa

SEQ ID NO: 1524 - DNA, 17 bp, synthetic construct
  misc_feature 1..17: note = Oligonucleotide
  source 1..17: mol_type = other DNA
tgacttggcttccaagg

SEQ ID NO: 1525 - DNA, 17 bp, synthetic construct
  misc_feature 1..17: note = Oligonucleotide
  source 1..17: mol_type = other DNA
tactgacttggcttcca

SEQ ID NO: 1526 - DNA, 17 bp, synthetic construct
  misc_feature 1..17: note = Oligonucleotide
  source 1..17: mol_type = other DNA
tggtactgacttggctt

SEQ ID NO: 1527 - DNA, 17 bp, synthetic construct
  misc_feature 1..17: note = Oligonucleotide
  source 1..17: mol_type = other DNA
agctggtactgacttgg

SEQ ID NO: 1528 - DNA, 17 bp, synthetic construct
  misc_feature 1..17: note = Oligonucleotide
  source 1..17: mol_type = other DNA
gtaagctggtactgact

SEQ ID NO: 1529 - DNA, 17 bp, synthetic construct
  misc_feature 1..17: note = Oligonucleotide
  source 1..17: mol_type = other DNA
taggtaagctggtactg

SEQ ID NO: 1530 - DNA, 17 bp, synthetic construct
  misc_feature 1..17: note = Oligonucleotide
  source 1..17: mol_type = other DNA
aaataggtaagctggta

SEQ ID NO: 1531 - DNA, 17 bp, synthetic construct
  misc_feature 1..17: note = Oligonucleotide
  source 1..17: mol_type = other DNA
atcaaataggtaagctg

SEQ ID NO: 1532 - DNA, 17 bp, synthetic construct
  misc_feature 1..17: note = Oligonucleotide
  source 1..17: mol_type = other DNA
tgaatcaaataggtaag

SEQ ID NO: 1533 - DNA, 17 bp, synthetic construct
  misc_feature 1..17: note = Oligonucleotide
  source 1..17: mol_type = other DNA
aactgaatcaaataggt

SEQ ID NO: 1534 - DNA, 17 bp, synthetic construct
  misc_feature 1..17: note = Oligonucleotide
  source 1..17: mol_type = other DNA
agcaactgaatcaaata

SEQ ID NO: 1535 - DNA, 17 bp, synthetic construct
  misc_feature 1..17: note = Oligonucleotide
  source 1..17: mol_type = other DNA
aacagcaactgaatcaa

SEQ ID NO: 1536 - DNA, 17 bp, synthetic construct
  misc_feature 1..17: note = Oligonucleotide
  source 1..17: mol_type = other DNA
gaaaacagcaactgaat

SEQ ID NO: 1537 - DNA, 17 bp, synthetic construct
  misc_feature 1..17: note = Oligonucleotide
  source 1..17: mol_type = other DNA
tgagaaaacagcaactg

SEQ ID NO: 1538 - DNA, 17 bp, synthetic construct
  misc_feature 1..17: note = Oligonucleotide
  source 1..17: mol_type = other DNA
gagtgagaaaacagcaa

SEQ ID NO: 1539 - DNA, 17 bp, synthetic construct
  misc_feature 1..17: note = Oligonucleotide
  source 1..17: mol_type = other DNA
agagagtgagaaaacag

SEQ ID NO: 1540 - DNA, 17 bp, synthetic construct
  misc_feature 1..17: note = Oligonucleotide
  source 1..17: mol_type = other DNA
tatagagagtgagaaaa

SEQ ID NO: 1541 - DNA, 17 bp, synthetic construct
  misc_feature 1..17: note = Oligonucleotide
  source 1..17: mol_type = other DNA
ggatatagagagtgaga

SEQ ID NO: 1542 - DNA, 17 bp, synthetic construct
  misc_feature 1..17: note = Oligonucleotide
  source 1..17: mol_type = other DNA
aatggatatagagagtg

SEQ ID NO: 1543 - DNA, 17 bp, synthetic construct
  misc_feature 1..17: note = Oligonucleotide
  source 1..17: mol_type = other DNA
tcaaatggatatagaga

SEQ ID NO: 1544 - DNA, 17 bp, synthetic construct
  misc_feature 1..17: note = Oligonucleotide
  source 1..17: mol_type = other DNA
atttcaaatggatatag

SEQ ID NO: 1545 - DNA, 17 bp, synthetic construct
  misc_feature 1..17: note = Oligonucleotide
  source 1..17: mol_type = other DNA
tcaatttcaaatggata

SEQ ID NO: 1546 - DNA, 17 bp, synthetic construct
  misc_feature 1..17: note = Oligonucleotide
  source 1..17: mol_type = other DNA
aaatcaatttcaaatgg

SEQ ID NO: 1547 - DNA, 17 bp, synthetic construct
  misc_feature 1..17: note = Oligonucleotide
  source 1..17: mol_type = other DNA
aataaatcaatttcaaa

SEQ ID NO: 1548 - DNA, 17 bp, synthetic construct
  misc_feature 1..17: note = Oligonucleotide
  source 1..17: mol_type = other DNA
taaaataaatcaatttc

SEQ ID NO: 1549 - DNA, 17 bp, synthetic construct
  misc_feature 1..17: note = Oligonucleotide
  source 1..17: mol_type = other DNA
atctaaaataaatcaat

SEQ ID NO: 1550 - DNA, 17 bp, synthetic construct
  misc_feature 1..17: note = Oligonucleotide
  source 1..17: mol_type = other DNA
aacatctaaaataaatc

SEQ ID NO: 1551 - DNA, 17 bp, synthetic construct
  misc_feature 1..17: note = Oligonucleotide
  source 1..17: mol_type = other DNA
tacaacatctaaaataa

SEQ ID NO: 1552 - DNA, 17 bp, synthetic construct
  misc_feature 1..17: note = Oligonucleotide
  source 1..17: mol_type = other DNA
gtatacaacatctaaaa

SEQ ID NO: 1553 - DNA, 17 bp, synthetic construct
  misc_feature 1..17: note = Oligonucleotide
  source 1..17: mol_type = other DNA
taagtatacaacatcta

SEQ ID NO: 1554 - DNA, 17 bp, synthetic construct
  misc_feature 1..17: note = Oligonucleotide
  source 1..17: mol_type = other DNA
acgtaagtatacaacat

SEQ ID NO: 1555 - DNA, 17 bp, synthetic construct
  misc_feature 1..17: note = Oligonucleotide
  source 1..17: mol_type = other DNA
ctaacgtaagtatacaa

SEQ ID NO: 1556 - DNA, 17 bp, synthetic construct
  misc_feature 1..17: note = Oligonucleotide
  source 1..17: mol_type = other DNA
agcctaacgtaagtata

SEQ ID NO: 1557 - DNA, 17 bp, synthetic construct
  misc_feature 1..17: note = Oligonucleotide
  source 1..17: mol_type = other DNA
gaaagcctaacgtaagt

SEQ ID NO: 1558 - DNA, 17 bp, synthetic construct
  misc_feature 1..17: note = Oligonucleotide
  source 1..17: mol_type = other DNA
acagaaagcctaacgta

SEQ ID NO: 1559 - DNA, 17 bp, synthetic construct
  misc_feature 1..17: note = Oligonucleotide
  source 1..17: mol_type = other DNA
ttaacagaaagcctaac

SEQ ID NO: 1560 - DNA, 17 bp, synthetic construct
  misc_feature 1..17: note = Oligonucleotide
  source 1..17: mol_type = other DNA
ctattaacagaaagcct

SEQ ID NO: 1561 - DNA, 17 bp, synthetic construct
  misc_feature 1..17: note = Oligonucleotide
  source 1..17: mol_type = other DNA
ccactattaacagaaag

SEQ ID NO: 1562 - DNA, 17 bp, synthetic construct
  misc_feature 1..17: note = Oligonucleotide
  source 1..17: mol_type = other DNA
aaaccactattaacaga

SEQ ID NO: 1563 - DNA, 17 bp, synthetic construct
  misc_feature 1..17: note = Oligonucleotide
  source 1..17: mol_type = other DNA
gaaaaaccactattaac

SEQ ID NO: 1564 - DNA, 17 bp, synthetic construct
  misc_feature 1..17: note = Oligonucleotide
  source 1..17: mol_type = other DNA
ggagaaaaaccactatt

SEQ ID NO: 1565 - DNA, 17 bp, synthetic construct
  misc_feature 1..17: note = Oligonucleotide
  source 1..17: mol_type = other DNA
acaggagaaaaaccact

SEQ ID NO: 1566 - DNA, 17 bp, synthetic construct
  misc_feature 1..17: note = Oligonucleotide
  source 1..17: mol_type = other DNA
tcaacaggagaaaaacc

SEQ ID NO: 1567 - DNA, 17 bp, synthetic construct
  misc_feature 1..17: note = Oligonucleotide
  source 1..17: mol_type = other DNA
ctgtcaacaggagaaaa

SEQ ID NO: 1568 - DNA, 17 bp, synthetic construct
  misc_feature 1..17: note = Oligonucleotide
  source 1..17: mol_type = other DNA
gctctgtcaacaggaga

SEQ ID NO: 1569 - DNA, 17 bp, synthetic construct
  misc_feature 1..17: note = Oligonucleotide
  source 1..17: mol_type = other DNA
gtggctctgtcaacagg

SEQ ID NO: 1570 - DNA, 17 bp, synthetic construct
  misc_feature 1..17: note = Oligonucleotide
  source 1..17: mol_type = other DNA
ccggtggctctgtcaac

SEQ ID NO: 1571 - DNA, 17 bp, synthetic construct
  misc_feature 1..17: note = Oligonucleotide
  source 1..17: mol_type = other DNA
aatccggtggctctgtc

SEQ ID NO: 1572 - DNA, 17 bp, synthetic construct
  misc_feature 1..17: note = Oligonucleotide
  source 1..17: mol_type = other DNA
cataatccggtggctct

SEQ ID NO: 1573 - DNA, 17 bp, synthetic construct
  misc_feature 1..17: note = Oligonucleotide
  source 1..17: mol_type = other DNA
tgtcataatccggtggc

SEQ ID NO: 1574 - DNA, 17 bp, synthetic construct
  misc_feature 1..17: note = Oligonucleotide
  source 1..17: mol_type = other DNA
ctgtgtcataatccggt

SEQ ID NO: 1575 - DNA, 17 bp, synthetic construct
  misc_feature 1..17: note = Oligonucleotide
  source 1..17: mol_type = other DNA
atcctgtgtcataatcc

SEQ ID NO: 1576 - DNA, 17 bp, synthetic construct
  misc_feature 1..17: note = Oligonucleotide
  source 1..17: mol_type = other DNA
ctcatcctgtgtcataa

SEQ ID NO: 1577 - DNA, 17 bp, synthetic construct
  misc_feature 1..17: note = Oligonucleotide
  source 1..17: mol_type = other DNA
ttcctcatcctgtgtca

SEQ ID NO: 1578 - DNA, 17 bp, synthetic construct
  misc_feature 1..17: note = Oligonucleotide
  source 1..17: mol_type = other DNA
atcttcctcatcctgtg

SEQ ID NO: 1579 - DNA, 17 bp, synthetic construct
  misc_feature 1..17: note = Oligonucleotide
  source 1..17: mol_type = other DNA
ttaatcttcctcatcct

SEQ ID NO: 1580 - DNA, 17 bp, synthetic construct
  misc_feature 1..17: note = Oligonucleotide
  source 1..17: mol_type = other DNA
tccttaatcttcctcat

SEQ ID NO: 1581 - DNA, 17 bp, synthetic construct
  misc_feature 1..17: note = Oligonucleotide
  source 1..17: mol_type = other DNA
ttatccttaatcttcct

SEQ ID NO: 1582 - DNA, 17 bp, synthetic construct
  misc_feature 1..17: note = Oligonucleotide
  source 1..17: mol_type = other DNA
tgattatccttaatctt

SEQ ID NO: 1583 - DNA, 17 bp, synthetic construct
  misc_feature 1..17: note = Oligonucleotide
  source 1..17: mol_type = other DNA
aattgattatccttaat

SEQ ID NO: 1584 - DNA, 17 bp, synthetic construct
  misc_feature 1..17: note = Oligonucleotide
  source 1..17: mol_type = other DNA
gtcaattgattatcctt

SEQ ID NO: 1585 - DNA, 17 bp, synthetic construct
  misc_feature 1..17: note = Oligonucleotide
  source 1..17: mol_type = other DNA
ttagtcaattgattatc

SEQ ID NO: 1586 - DNA, 17 bp, synthetic construct
  misc_feature 1..17: note = Oligonucleotide
  source 1..17: mol_type = other DNA
aaattagtcaattgatt

SEQ ID NO: 1587 - DNA, 17 bp, synthetic construct
  misc_feature 1..17: note = Oligonucleotide
  source 1..17: mol_type = other DNA
atgaaattagtcaattg

SEQ ID NO: 1588 - DNA, 17 bp, synthetic construct
  misc_feature 1..17: note = Oligonucleotide
  source 1..17: mol_type = other DNA
taaatgaaattagtcaa

SEQ ID NO: 1589 - DNA, 17 bp, synthetic construct
  misc_feature 1..17: note = Oligonucleotide
  source 1..17: mol_type = other DNA
ttctaaatgaaattagt

SEQ ID NO: 1590 - DNA, 17 bp, synthetic construct
  misc_feature 1..17: note = Oligonucleotide
  source 1..17: mol_type = other DNA
atattctaaatgaaatt

SEQ ID NO: 1591 - DNA, 17 bp, synthetic construct
  misc_feature 1..17: note = Oligonucleotide
  source 1..17: mol_type = other DNA
ataatattctaaatgaa

SEQ ID NO: 1592 - DNA, 17 bp, synthetic construct
  misc_feature 1..17: note = Oligonucleotide
  source 1..17: mol_type = other DNA
ttgataatattctaaat

SEQ ID NO: 1593 - DNA, 17 bp, synthetic construct
  misc_feature 1..17: note = Oligonucleotide
  source 1..17: mol_type = other DNA
tgtttgataatattcta

SEQ ID NO: 1594 - DNA, 17 bp, synthetic construct
  misc_feature 1..17: note = Oligonucleotide
  source 1..17: mol_type = other DNA
aaatgtttgataatatt

SEQ ID NO: 1595 - DNA, 17 bp, synthetic construct
  misc_feature 1..17: note = Oligonucleotide
  source 1..17: mol_type = other DNA
ttgaaatgtttgataat

SEQ ID NO: 1596 - DNA, 17 bp, synthetic construct
  misc_feature 1..17: note = Oligonucleotide
  source 1..17: mol_type = other DNA
tagttgaaatgtttgat

SEQ ID NO: 1597 - DNA, 17 bp, synthetic construct
  misc_feature 1..17: note = Oligonucleotide
  source 1..17: mol_type = other DNA
acctagttgaaatgttt

SEQ ID NO: 1598 - DNA, 17 bp, synthetic construct
  misc_feature 1..17: note = Oligonucleotide
  source 1..17: mol_type = other DNA
gatacctagttgaaatg

SEQ ID NO: 1599 - DNA, 17 bp, synthetic construct
  misc_feature 1..17: note = Oligonucleotide
  source 1..17: mol_type = other DNA
tctgatacctagttgaa

SEQ ID NO: 1600 - DNA, 17 bp, synthetic construct
  misc_feature 1..17: note = Oligonucleotide
  source 1..17: mol_type = other DNA
ttttctgatacctagtt

SEQ ID NO: 1601 - DNA, 17 bp, synthetic construct
  misc_feature 1..17: note = Oligonucleotide
  source 1..17: mol_type = other DNA
cctttttctgataccta

SEQ ID NO: 1602 - DNA, 17 bp, synthetic construct
  misc_feature 1..17: note = Oligonucleotide
  source 1..17: mol_type = other DNA
aagcctttttctgatac

SEQ ID NO: 1603 - DNA, 17 bp, synthetic construct
  misc_feature 1..17: note = Oligonucleotide
  source 1..17: mol_type = other DNA
agaaagcctttttctga

SEQ ID NO: 1604 - DNA, 17 bp, synthetic construct
  misc_feature 1..17: note = Oligonucleotide
  source 1..17: mol_type = other DNA
gaaagaaagcctttttc

SEQ ID NO: 1605 - DNA, 17 bp, synthetic construct
  misc_feature 1..17: note = Oligonucleotide
  source 1..17: mol_type = other DNA
tatgaaagaaagccttt

SEQ ID NO: 1606 - DNA, 17 bp, synthetic construct
  misc_feature 1..17: note = Oligonucleotide
  source 1..17: mol_type = other DNA
tcttatgaaagaaagcc

SEQ ID NO: 1607 - DNA, 17 bp, synthetic construct
  misc_feature 1..17: note = Oligonucleotide
  source 1..17: mol_type = other DNA
tagtcttatgaaagaaa

SEQ ID NO: 1608 - DNA, 17 bp, synthetic construct
  misc_feature 1..17: note = Oligonucleotide
  source 1..17: mol_type = other DNA
aaatagtcttatgaaag

SEQ ID NO: 1609 - DNA, 17 bp, synthetic construct
  misc_feature 1..17: note = Oligonucleotide
  source 1..17: mol_type = other DNA
ttaaaatagtcttatga

SEQ ID NO: 1610 - DNA, 17 bp, synthetic construct
  misc_feature 1..17: note = Oligonucleotide
  source 1..17: mol_type = other DNA
tatttaaaatagtctta

SEQ ID NO: 1611 - DNA, 17 bp, synthetic construct
  misc_feature 1..17: note = Oligonucleotide
  source 1..17: mol_type = other DNA
ttctatttaaaatagtc

SEQ ID NO: 1612 - DNA, 17 bp, synthetic construct
  misc_feature 1..17: note = Oligonucleotide
  source 1..17: mol_type = other DNA
aatttctatttaaaata

SEQ ID NO: 1613 - DNA, 17 bp, synthetic construct
  misc_feature 1..17: note = Oligonucleotide
  source 1..17: mol_type = other DNA
aataatttctatttaaa

SEQ ID NO: 1614 - DNA, 17 bp, synthetic construct
  misc_feature 1..17: note = Oligonucleotide
  source 1..17: mol_type = other DNA
tgaaataatttctattt

SEQ ID NO: 1615 - DNA, 17 bp, synthetic construct
  misc_feature 1..17: note = Oligonucleotide
  source 1..17: mol_type = other DNA
tgttgaaataatttcta

SEQ ID NO: 1616 - DNA, 17 bp, synthetic construct
  misc_feature 1..17: note = Oligonucleotide
  source 1..17: mol_type = other DNA
aattgttgaaataattt

SEQ ID NO: 1617 - DNA, 17 bp, synthetic construct
  misc_feature 1..17: note = Oligonucleotide
  source 1..17: mol_type = other DNA
tttaattgttgaaataa

SEQ ID NO: 1618 - DNA, 17 bp, synthetic construct
  misc_feature 1..17: note = Oligonucleotide
  source 1..17: mol_type = other DNA
tactttaattgttgaaa

SEQ ID NO: 1619 - DNA, 17 bp, synthetic construct
  misc_feature 1..17: note = Oligonucleotide
  source 1..17: mol_type = other DNA
cattactttaattgttg

SEQ ID NO: 1620 - DNA, 17 bp, synthetic construct
  misc_feature 1..17: note = Oligonucleotide
  source 1..17: mol_type = other DNA
caacattactttaattg

SEQ ID NO: 1621 - DNA, 17 bp, synthetic construct
  misc_feature 1..17: note = Oligonucleotide
  source 1..17: mol_type = other DNA
ggtcaacattactttaa

SEQ ID NO: 1622 - DNA, 17 bp, synthetic construct
  misc_feature 1..17: note = Oligonucleotide
  source 1..17: mol_type = other DNA
gatggtcaacattactt

SEQ ID NO: 1623 - DNA, 17 bp, synthetic construct
  misc_feature 1..17: note = Oligonucleotide
  source 1..17: mol_type = other DNA
ggggatggtcaacatta

SEQ ID NO: 1624 - DNA, 17 bp, synthetic construct
  misc_feature 1..17: note = Oligonucleotide
  source 1..17: mol_type = other DNA
gagggggatggtcaaca

SEQ ID NO: 1625 - DNA, 17 bp, synthetic construct
  misc_feature 1..17: note = Oligonucleotide
  source 1..17: mol_type = other DNA
tgagagggggatggtca

SEQ ID NO: 1626 - DNA, 17 bp, synthetic construct
  misc_feature 1..17: note = Oligonucleotide
  source 1..17: mol_type = other DNA
agctgagagggggatgg

SEQ ID NO: 1627 - DNA, 17 bp, synthetic construct
  misc_feature 1..17: note = Oligonucleotide
  source 1..17: mol_type = other DNA
ttcagctgagaggggga

SEQ ID NO: 1628 - DNA, 17 bp, synthetic construct
  misc_feature 1..17: note = Oligonucleotide
  source 1..17: mol_type = other DNA
ttattcagctgagaggg

SEQ ID NO: 1629 - DNA, 17 bp, synthetic construct
  misc_feature 1..17: note = Oligonucleotide
  source 1..17: mol_type = other DNA
tctttattcagctgaga

SEQ ID NO: 1630 - DNA, 17 bp, synthetic construct
  misc_feature 1..17: note = Oligonucleotide
  source 1..17: mol_type = other DNA
ttttctttattcagctg

SEQ ID NO: 1631 - DNA, 17 bp, synthetic construct
  misc_feature 1..17: note = Oligonucleotide
  source 1..17: mol_type = other DNA
aatttttctttattcag

SEQ ID NO: 1632 - DNA, 17 bp, synthetic construct
  misc_feature 1..17: note = Oligonucleotide
  source 1..17: mol_type = other DNA
ctaaatttttctttatt

SEQ ID NO: 1633 - DNA, 17 bp, synthetic construct
  misc_feature 1..17: note = Oligonucleotide
  source 1..17: mol_type = other DNA
gaactaaatttttcttt

SEQ ID NO: 1634 - DNA, 17 bp, synthetic construct
  misc_feature 1..17: note = Oligonucleotide
  source 1..17: mol_type = other DNA
attgaactaaatttttc

SEQ ID NO: 1635 - DNA, 17 bp, synthetic construct
  misc_feature 1..17: note = Oligonucleotide
  source 1..17: mol_type = other DNA
taaattgaactaaattt

SEQ ID NO: 1636 - DNA, 17 bp, synthetic construct
  misc_feature 1..17: note = Oligonucleotide
  source 1..17: mol_type = other DNA
caataaattgaactaaa

SEQ ID NO: 1637 - DNA, 17 bp, synthetic construct
  misc_feature 1..17: note = Oligonucleotide
  source 1..17: mol_type = other DNA
ttgcaataaattgaact

SEQ ID NO: 1638 - DNA, 17 bp, synthetic construct
  misc_feature 1..17: note = Oligonucleotide
  source 1..17: mol_type = other DNA
aaattgcaataaattga

SEQ ID NO: 1639 - DNA, 17 bp, synthetic construct
  misc_feature 1..17: note = Oligonucleotide
  source 1..17: mol_type = other DNA
attaaattgcaataaat

SEQ ID NO: 1640 - DNA, 17 bp, synthetic construct
  misc_feature 1..17: note = Oligonucleotide
  source 1..17: mol_type = other DNA
gtaattaaattgcaata

SEQ ID NO: 1641 - DNA, 17 bp, synthetic construct
  misc_feature 1..17: note = Oligonucleotide
  source 1..17: mol_type = other DNA
attgtaattaaattgca

SEQ ID NO: 1642 - DNA, 17 bp, synthetic construct
  misc_feature 1..17: note = Oligonucleotide
  source 1..17: mol_type = other DNA
agtattgtaattaaatt

SEQ ID NO: 1643 - DNA, 17 bp, synthetic construct
  misc_feature 1..17: note = Oligonucleotide
  source 1..17: mol_type = other DNA
ggtagtattgtaattaa

SEQ ID NO: 1644 - DNA, 17 bp, synthetic construct
  misc_feature 1..17: note = Oligonucleotide
  source 1..17: mol_type = other DNA
gaaggtagtattgtaat

SEQ ID NO: 1645 - DNA, 17 bp, synthetic construct
  misc_feature 1..17: note = Oligonucleotide
  source 1..17: mol_type = other DNA
tgtgaaggtagtattgt

SEQ ID NO: 1646 - DNA, 17 bp, synthetic construct
  misc_feature 1..17: note = Oligonucleotide
  source 1..17: mol_type = other DNA
tgttgtgaaggtagtat

SEQ ID NO: 1647 - DNA, 17 bp, synthetic construct
  misc_feature 1..17: note = Oligonucleotide
  source 1..17: mol_type = other DNA
aaatgttgtgaaggtag

SEQ ID NO: 1648 - DNA, 17 bp, synthetic construct
  misc_feature 1..17: note = Oligonucleotide
  source 1..17: mol_type = other DNA
tgaaaatgttgtgaagg

SEQ ID NO: 1649 - DNA, 17 bp, synthetic construct
  misc_feature 1..17: note = Oligonucleotide
  source 1..17: mol_type = other DNA
acatgaaaatgttgtga

SEQ ID NO: 1650 - DNA, 17 bp, synthetic construct
  misc_feature 1..17: note = Oligonucleotide
  source 1..17: mol_type = other DNA
aacacatgaaaatgttg

SEQ ID NO: 1651 - DNA, 17 bp, synthetic construct
  misc_feature 1..17: note = Oligonucleotide
  source 1..17: mol_type = other DNA
taaaacacatgaaaatg

SEQ ID NO: 1652 - DNA, 17 bp, synthetic construct
  misc_feature 1..17: note = Oligonucleotide
  source 1..17: mol_type = other DNA
atttaaaacacatgaaa

SEQ ID NO: 1653 - DNA, 17 bp, synthetic construct
  misc_feature 1..17: note = Oligonucleotide
  source 1..17: mol_type = other DNA
tttatttaaaacacatg

SEQ ID NO: 1654 - DNA, 17 bp, synthetic construct
  misc_feature 1..17: note = Oligonucleotide
  source 1..17: mol_type = other DNA
atatttatttaaaacac

SEQ ID NO: 1655 - DNA, 17 bp, synthetic construct
  misc_feature 1..17: note = Oligonucleotide
  source 1..17: mol_type = other DNA
aaaatatttatttaaaa

SEQ ID NO: 1656 - DNA, 17 bp, synthetic construct
  misc_feature 1..17: note = Oligonucleotide
  source 1..17: mol_type = other DNA
taaaaaatatttattta

SEQ ID NO: 1657 - DNA, 17 bp, synthetic construct
  misc_feature 1..17: note = Oligonucleotide
  source 1..17: mol_type = other DNA
aattaaaaaatatttat

SEQ ID NO: 1658 - DNA, 17 bp, synthetic construct
  misc_feature 1..17: note = Oligonucleotide
  source 1..17: mol_type = other DNA
gccaattaaaaaatatt

SEQ ID NO: 1659 - DNA, 17 bp, synthetic construct
  misc_feature 1..17: note = Oligonucleotide
  source 1..17: mol_type = other DNA
ttagccaattaaaaaat

SEQ ID NO: 1660 - DNA, 17 bp, synthetic construct
  misc_feature 1..17: note = Oligonucleotide
  source 1..17: mol_type = other DNA
cctttagccaattaaaa

SEQ ID NO: 1661 - DNA, 17 bp, synthetic construct
  misc_feature 1..17: note = Oligonucleotide
  source 1..17: mol_type = other DNA
tgtcctttagccaatta

SEQ ID NO: 1662 - DNA, 17 bp, synthetic construct
  misc_feature 1..17: note = Oligonucleotide
  source 1..17: mol_type = other DNA
gaatgtcctttagccaa

SEQ ID NO: 1663 - DNA, 17 bp, synthetic construct
  misc_feature 1..17: note = Oligonucleotide
  source 1..17: mol_type = other DNA
cttgaatgtcctttagc

SEQ ID NO: 1664 - DNA, 17 bp, synthetic construct
  misc_feature 1..17: note = Oligonucleotide
  source 1..17: mol_type = other DNA
ttgcttgaatgtccttt

SEQ ID NO: 1665 - DNA, 17 bp, synthetic construct
  misc_feature 1..17: note = Oligonucleotide
  source 1..17: mol_type = other DNA
tctttgcttgaatgtcc

SEQ ID NO: 1666 - DNA, 17 bp, synthetic construct
  misc_feature 1..17: note = Oligonucleotide
  source 1..17: mol_type = other DNA
atttctttgcttgaatg

SEQ ID NO: 1667 - DNA, 17 bp, synthetic construct
  misc_feature 1..17: note = Oligonucleotide
  source 1..17: mol_type = other DNA
agcatttctttgcttga

SEQ ID NO: 1668 - DNA, 17 bp, synthetic construct
  misc_feature 1..17: note = Oligonucleotide
  source 1..17: mol_type = other DNA
gaaagcatttctttgct

SEQ ID NO: 1669 - DNA, 17 bp, synthetic construct
  misc_feature 1..17: note = Oligonucleotide
  source 1..17: mol_type = other DNA
aaagaaagcatttcttt

SEQ ID NO: 1670 - DNA, 17 bp, synthetic construct
  misc_feature 1..17: note = Oligonucleotide
  source 1..17: mol_type = other DNA
agtaaagaaagcatttc

SEQ ID NO: 1671 - DNA, 17 bp, synthetic construct
  misc_feature 1..17: note = Oligonucleotide
  source 1..17: mol_type = other DNA
ttaagtaaagaaagcat

SEQ ID NO: 1672 - DNA, 17 bp, synthetic construct
  misc_feature 1..17: note = Oligonucleotide
  source 1..17: mol_type = other DNA
attttaagtaaagaaag

SEQ ID NO: 1673 - DNA, 17 bp, synthetic construct
  misc_feature 1..17: note = Oligonucleotide
  source 1..17: mol_type = other DNA
gacattttaagtaaaga

SEQ ID NO: 1674 - DNA, 17 bp, synthetic construct
  misc_feature 1..17: note = Oligonucleotide
  source 1..17: mol_type = other DNA
atagacattttaagtaa

SEQ ID NO: 1675 - DNA, 17 bp, synthetic construct
  misc_feature 1..17: note = Oligonucleotide
  source 1..17: mol_type = other DNA
gagatagacattttaag

SEQ ID NO: 1676 - DNA, 17 bp, synthetic construct
  misc_feature 1..17: note = Oligonucleotide
  source 1..17: mol_type = other DNA
aatgagatagacatttt

SEQ ID NO: 1677 - DNA, 17 bp, synthetic construct
  misc_feature 1..17: note = Oligonucleotide
  source 1..17: mol_type = other DNA
gcaaatgagatagacat

SEQ ID NO: 1678 - DNA, 17 bp, synthetic construct
  misc_feature 1..17: note = Oligonucleotide
  source 1..17: mol_type = other DNA
gcagcaaatgagataga

SEQ ID NO: 1679 - DNA, 17 bp, synthetic construct
  misc_feature 1..17: note = Oligonucleotide
  source 1..17: mol_type = other DNA
aaggcagcaaatgagat

SEQ ID NO: 1680 - DNA, 17 bp, synthetic construct
  misc_feature 1..17: note = Oligonucleotide
  source 1..17: mol_type = other DNA
gaaaaggcagcaaatga

SEQ ID NO: 1681 - DNA, 17 bp, synthetic construct
  misc_feature 1..17: note = Oligonucleotide
  source 1..17: mol_type = other DNA
agtgaaaaggcagcaaa

SEQ ID NO: 1682 - DNA, 17 bp, synthetic construct
  misc_feature 1..17: note = Oligonucleotide
  source 1..17: mol_type = other DNA
cttagtgaaaaggcagc

SEQ ID NO: 1683 - DNA, 17 bp, synthetic construct
  misc_feature 1..17: note = Oligonucleotide
  source 1..17: mol_type = other DNA
aggcttagtgaaaaggc

SEQ ID NO: 1684 - DNA, 17 bp, synthetic construct
  misc_feature 1..17: note = Oligonucleotide
  source 1..17: mol_type = other DNA
taaaggcttagtgaaaa

SEQ ID NO: 1685 - DNA, 17 bp, synthetic construct
  misc_feature 1..17: note = Oligonucleotide
  source 1..17: mol_type = other DNA
aagtaaaggcttagtga

SEQ ID NO: 1686 - DNA, 17 bp, synthetic construct
  misc_feature 1..17: note = Oligonucleotide
  source 1..17: mol_type = other DNA
acaaagtaaaggcttag

SEQ ID NO: 1687 - DNA, 17 bp, synthetic construct
  misc_feature 1..17: note = Oligonucleotide
  source 1..17: mol_type = other DNA
ttaacaaagtaaaggct

SEQ ID NO: 1688 - DNA, 17 bp, synthetic construct
  misc_feature 1..17: note = Oligonucleotide
  source 1..17: mol_type = other DNA
ttattaacaaagtaaag

SEQ ID NO: 1689 - DNA, 17 bp, synthetic construct
  misc_feature 1..17: note = Oligonucleotide
  source 1..17: mol_type = other DNA
cttttattaacaaagta

SEQ ID NO: 1690 - DNA, 17 bp, synthetic construct
  misc_feature 1..17: note = Oligonucleotide
  source 1..17: mol_type = other DNA
acacttttattaacaaa

SEQ ID NO: 1691 - DNA, 17 bp, synthetic construct
  misc_feature 1..17: note = Oligonucleotide
  source 1..17: mol_type = other DNA
tggacacttttattaac

SEQ ID NO: 1692 - DNA, 17 bp, synthetic construct
  misc_feature 1..17: note = Oligonucleotide
  source 1..17: mol_type = other DNA
caatggacacttttatt

SEQ ID NO: 1693 - DNA, 17 bp, synthetic construct
  misc_feature 1..17: note = Oligonucleotide
  source 1..17: mol_type = other DNA
acacaatggacactttt

SEQ ID NO: 1694 - DNA, 17 bp, synthetic construct
  misc_feature 1..17: note = Oligonucleotide
  source 1..17: mol_type = other DNA
atcacacaatggacact

SEQ ID NO: 1695 - DNA, 17 bp, synthetic construct
  misc_feature 1..17: note = Oligonucleotide
  source 1..17: mol_type = other DNA
aacatcacacaatggac

SEQ ID NO: 1696 - DNA, 17 bp, synthetic construct
  misc_feature 1..17: note = Oligonucleotide
  source 1..17: mol_type = other DNA
aaaaacatcacacaatg

SEQ ID NO: 1697 - DNA, 17 bp, synthetic construct
  misc_feature 1..17: note = Oligonucleotide
  source 1..17: mol_type = other DNA
atcaaaaacatcacaca

SEQ ID NO: 1698 - DNA, 17 bp, synthetic construct
  misc_feature 1..17: note = Oligonucleotide
  source 1..17: mol_type = other DNA
aaaatcaaaaacatcac

SEQ ID NO: 1699 - DNA, 17 bp, synthetic construct
  misc_feature 1..17: note = Oligonucleotide
  source 1..17: mol_type = other DNA
tgtaaaatcaaaaacat

SEQ ID NO: 1700 - DNA, 17 bp, synthetic construct
  misc_feature 1..17: note = Oligonucleotide
  source 1..17: mol_type = other DNA
aactgtaaaatcaaaaa

SEQ ID NO: 1701 - DNA, 17 bp, synthetic construct
  misc_feature 1..17: note = Oligonucleotide
  source 1..17: mol_type = other DNA
gcaaactgtaaaatcaa

SEQ ID NO: 1702 - DNA, 17 bp, synthetic construct
  misc_feature 1..17: note = Oligonucleotide
  source 1..17: mol_type = other DNA
ttagcaaactgtaaaat

SEQ ID NO: 1703 - DNA, 17 bp, synthetic construct
  misc_feature 1..17: note = Oligonucleotide
  source 1..17: mol_type = other DNA
gatttagcaaactgtaa

SEQ ID NO: 1704 - DNA, 17 bp, synthetic construct
  misc_feature 1..17: note = Oligonucleotide
  source 1..17: mol_type = other DNA
taagatttagcaaactg

SEQ ID NO: 1705 - DNA, 17 bp, synthetic construct
  misc_feature 1..17: note = Oligonucleotide
  source 1..17: mol_type = other DNA
aaataagatttagcaaa

SEQ ID NO: 1706 - DNA, 17 bp, synthetic construct
  misc_feature 1..17: note = Oligonucleotide
  source 1..17: mol_type = other DNA
agaaaataagatttagc

SEQ ID NO: 1707 - DNA, 17 bp, synthetic construct
  misc_feature 1..17: note = Oligonucleotide
  source 1..17: mol_type = other DNA
ccaagaaaataagattt

SEQ ID NO: 1708 - DNA, 17 bp, synthetic construct
  misc_feature 1..17: note = Oligonucleotide
  source 1..17: mol_type = other DNA
actccaagaaaataaga

SEQ ID NO: 1709 - DNA, 17 bp, synthetic construct
  misc_feature 1..17: note = Oligonucleotide
  source 1..17: mol_type = other DNA
gcaactccaagaaaata

SEQ ID NO: 1710 - DNA, 17 bp, synthetic construct
  misc_feature 1..17: note = Oligonucleotide
  source 1..17: mol_type = other DNA
aaagcaactccaagaaa

SEQ ID NO: 1711 - DNA, 17 bp, synthetic construct
  misc_feature 1..17: note = Oligonucleotide
  source 1..17: mol_type = other DNA
caaaaagcaactccaag

SEQ ID NO: 1712 - DNA, 17 bp, synthetic construct
  misc_feature 1..17: note = Oligonucleotide
  source 1..17: mol_type = other DNA
taccaaaaagcaactcc

SEQ ID NO: 1713 - DNA, 17 bp, synthetic construct
  misc_feature 1..17: note = Oligonucleotide
  source 1..17: mol_type = other DNA
tgttaccaaaaagcaac

SEQ ID NO: 1714 - DNA, 17 bp, synthetic construct
  misc_feature 1..17: note = Oligonucleotide
  source 1..17: mol_type = other DNA
ggctgttaccaaaaagc

SEQ ID NO: 1715 - DNA, 17 bp, synthetic construct
  misc_feature 1..17: note = Oligonucleotide
  source 1..17: mol_type = other DNA
tggggctgttaccaaaa

SEQ ID NO: 1716 - DNA, 17 bp, synthetic construct
  misc_feature 1..17: note = Oligonucleotide
  source 1..17: mol_type = other DNA
caatggggctgttacca

SEQ ID NO: 1717 - DNA, 17 bp, synthetic construct
  misc_feature 1..17: note = Oligonucleotide
  source 1..17: mol_type = other DNA
tagcaatggggctgtta

SEQ ID NO: 1718 - DNA, 17 bp, synthetic construct
  misc_feature 1..17: note = Oligonucleotide
  source 1..17: mol_type = other DNA
gagtagcaatggggctg

SEQ ID NO: 1719 - DNA, 17 bp, synthetic construct
  misc_feature 1..17: note = Oligonucleotide
  source 1..17: mol_type = other DNA
ggggagtagcaatgggg

SEQ ID NO: 1720 - DNA, 17 bp, synthetic construct
  misc_feature 1..17: note = Oligonucleotide
  source 1..17: mol_type = other DNA
aatggggagtagcaatg

SEQ ID NO: 1721 - DNA, 17 bp, synthetic construct
  misc_feature 1..17: note = Oligonucleotide
  source 1..17: mol_type = other DNA
taaaatggggagtagca

SEQ ID NO: 1722 - DNA, 17 bp, synthetic construct
  misc_feature 1..17: note = Oligonucleotide
  source 1..17: mol_type = other DNA
caataaaatggggagta

SEQ ID NO: 1723 - DNA, 17 bp, synthetic construct
  misc_feature 1..17: note = Oligonucleotide
  source 1..17: mol_type = other DNA
aaacaataaaatgggga

SEQ ID NO: 1724 - DNA, 17 bp, synthetic construct
  misc_feature 1..17: note = Oligonucleotide
  source 1..17: mol_type = other DNA
gtaaaacaataaaatgg

SEQ ID NO: 1725 - DNA, 17 bp, synthetic construct
  misc_feature 1..17: note = Oligonucleotide
  source 1..17: mol_type = other DNA
gatgtaaaacaataaaa

SEQ ID NO: 1726 - DNA, 17 bp, synthetic construct
  misc_feature 1..17: note = Oligonucleotide
  source 1..17: mol_type = other DNA
attgatgtaaaacaata

SEQ ID NO: 1727 - DNA, 17 bp, synthetic construct
  misc_feature 1..17: note = Oligonucleotide
  source 1..17: mol_type = other DNA
tgcattgatgtaaaaca

SEQ ID NO: 1728 - DNA, 17 bp, synthetic construct
  misc_feature 1..17: note = Oligonucleotide
  source 1..17: mol_type = other DNA
gcatgcattgatgtaaa

SEQ ID NO: 1729 - DNA, 17 bp, synthetic construct
  misc_feature 1..17: note = Oligonucleotide
  source 1..17: mol_type = other DNA
gaagcatgcattgatgt

SEQ ID NO: 1730 - DNA, 17 bp, synthetic construct
  misc_feature 1..17: note = Oligonucleotide
  source 1..17: mol_type = other DNA
aacgaagcatgcattga

SEQ ID NO: 1731 - DNA, 17 bp, synthetic construct
  misc_feature 1..17: note = Oligonucleotide
  source 1..17: mol_type = other DNA
cacaacgaagcatgcat

SEQ ID NO: 1732 - DNA, 17 bp, synthetic construct
  misc_feature 1..17: note = Oligonucleotide
  source 1..17: mol_type = other DNA
gatcacaacgaagcatg

SEQ ID NO: 1733 - DNA, 17 bp, synthetic construct
  misc_feature 1..17: note = Oligonucleotide
  source 1..17: mol_type = other DNA
agggatcacaacgaagc

SEQ ID NO: 1734 - DNA, 17 bp, synthetic construct
  misc_feature 1..17: note = Oligonucleotide
  source 1..17: mol_type = other DNA
ttgagggatcacaacga

SEQ ID NO: 1735 - DNA, 17 bp, synthetic construct
  misc_feature 1..17: note = Oligonucleotide
  source 1..17: mol_type = other DNA
atcttgagggatcacaa

SEQ ID NO: 1736 - DNA, 17 bp, synthetic construct
  misc_feature 1..17: note = Oligonucleotide
  source 1..17: mol_type = other DNA
tacatcttgagggatca

SEQ ID NO: 1737 - DNA, 17 bp, synthetic construct
  misc_feature 1..17: note = Oligonucleotide
  source 1..17: mol_type = other DNA
tgttacatcttgaggga

SEQ ID NO: 1738 - DNA, 17 bp, synthetic construct
  misc_feature 1..17: note = Oligonucleotide
  source 1..17: mol_type = other DNA
aagtgttacatcttgag

SEQ ID NO: 1739 - DNA, 17 bp, synthetic construct
  misc_feature 1..17: note = Oligonucleotide
  source 1..17: mol_type = other DNA
accaagtgttacatctt

SEQ ID NO: 1740 - DNA, 17 bp, synthetic construct
  misc_feature 1..17: note = Oligonucleotide
  source 1..17: mol_type = other DNA
cataccaagtgttacat

SEQ ID NO: 1741 - DNA, 17 bp, synthetic construct
  misc_feature 1..17: note = Oligonucleotide
  source 1..17: mol_type = other DNA
gagcataccaagtgtta

SEQ ID NO: 1742 - DNA, 17 bp, synthetic construct
  misc_feature 1..17: note = Oligonucleotide
  source 1..17: mol_type = other DNA
accgagcataccaagtg

SEQ ID NO: 1743 - DNA, 17 bp, synthetic construct
  misc_feature 1..17: note = Oligonucleotide
  source 1..17: mol_type = other DNA
tcaaccgagcataccaa

SEQ ID NO: 1744 - DNA, 17 bp, synthetic construct
  misc_feature 1..17: note = Oligonucleotide
  source 1..17: mol_type = other DNA
tcctcaaccgagcatac

SEQ ID NO: 1745 - DNA, 17 bp, synthetic construct
  misc_feature 1..17: note = Oligonucleotide
  source 1..17: mol_type = other DNA
atatcctcaaccgagca

SEQ ID NO: 1746 - DNA, 17 bp, synthetic construct
  misc_feature 1..17: note = Oligonucleotide
  source 1..17: mol_type = other DNA
ttcatatcctcaaccga

SEQ ID NO: 1747 - DNA, 17 bp, synthetic construct
  misc_feature 1..17: note = Oligonucleotide
  source 1..17: mol_type = other DNA
tttttcatatcctcaac

SEQ ID NO: 1748 - DNA, 17 bp, synthetic construct
  misc_feature 1..17: note = Oligonucleotide
  source 1..17: mol_type = other DNA
tattttttcatatcctc

SEQ ID NO: 1749 - DNA, 17 bp, synthetic construct
  misc_feature 1..17: note = Oligonucleotide
  source 1..17: mol_type = other DNA
aagtattttttcatatc

SEQ ID NO: 1750 - DNA, 17 bp, synthetic construct
  misc_feature 1..17: note = Oligonucleotide
  source 1..17: mol_type = other DNA
cggaagtattttttcat

SEQ ID NO: 1751 - DNA, 17 bp, synthetic construct
  misc_feature 1..17: note = Oligonucleotide
  source 1..17: mol_type = other DNA
tttcggaagtatttttt

SEQ ID NO: 1752 - DNA, 17 bp, synthetic construct
  misc_feature 1..17: note = Oligonucleotide
  source 1..17: mol_type = other DNA
tggtttcggaagtattt

SEQ ID NO: 1753 - DNA, 17 bp, synthetic construct
  misc_feature 1..17: note = Oligonucleotide
  source 1..17: mol_type = other DNA
tcctggtttcggaagta

SEQ ID NO: 1754 - DNA, 17 bp, synthetic construct
  misc_feature 1..17: note = Oligonucleotide
  source 1..17: mol_type = other DNA
aattcctggtttcggaa

SEQ ID NO: 1755 - DNA, 17 bp, synthetic construct
  misc_feature 1..17: note = Oligonucleotide
  source 1..17: mol_type = other DNA
ttgaattcctggtttcg

SEQ ID NO: 1756 - DNA, 17 bp, synthetic construct
  misc_feature 1..17: note = Oligonucleotide
  source 1..17: mol_type = other DNA
acattgaattcctggtt

SEQ ID NO: 1757 - DNA, 17 bp, synthetic construct
  misc_feature 1..17: note = Oligonucleotide
  source 1..17: mol_type = other DNA
catacattgaattcctg

SEQ ID NO: 1758 - DNA, 17 bp, synthetic construct
  misc_feature 1..17: note = Oligonucleotide
  source 1..17: mol_type = other DNA
aaacatacattgaattc

SEQ ID NO: 1759 - DNA, 17 bp, synthetic construct
  misc_feature 1..17: note = Oligonucleotide
  source 1..17: mol_type = other DNA
aacaaacatacattgaa

SEQ ID NO: 1760 - DNA, 17 bp, synthetic construct
  misc_feature 1..17: note = Oligonucleotide
  source 1..17: mol_type = other DNA
taaaacaaacatacatt

SEQ ID NO: 1761 - DNA, 17 bp, synthetic construct
  misc_feature 1..17: note = Oligonucleotide
  source 1..17: mol_type = other DNA
gtataaaacaaacatac

SEQ ID NO: 1762 - DNA, 17 bp, synthetic construct
  misc_feature 1..17: note = Oligonucleotide
  source 1..17: mol_type = other DNA
acagtataaaacaaaca

SEQ ID NO: 1763 - DNA, 17 bp, synthetic construct
  misc_feature 1..17: note = Oligonucleotide
  source 1..17: mol_type = other DNA
caaacagtataaaacaa

SEQ ID NO: 1764 - DNA, 17 bp, synthetic construct
  misc_feature 1..17: note = Oligonucleotide
  source 1..17: mol_type = other DNA
tatcaaacagtataaaa

SEQ ID NO: 1765 - DNA, 17 bp, synthetic construct
  misc_feature 1..17: note = Oligonucleotide
  source 1..17: mol_type = other DNA
tcttatcaaacagtata

SEQ ID NO: 1766 - DNA, 17 bp, synthetic construct
  misc_feature 1..17: note = Oligonucleotide
  source 1..17: mol_type = other DNA
ttttcttatcaaacagt

SEQ ID NO: 1767 - DNA, 17 bp, synthetic construct
  misc_feature 1..17: note = Oligonucleotide
  source 1..17: mol_type = other DNA
tacttttcttatcaaac

SEQ ID NO: 1768 - DNA, 17 bp, synthetic construct
  misc_feature 1..17: note = Oligonucleotide
  source 1..17: mol_type = other DNA
acctacttttcttatca

SEQ ID NO: 1769 - DNA, 17 bp, synthetic construct
  misc_feature 1..17: note = Oligonucleotide
  source 1..17: mol_type = other DNA
tggacctacttttctta

SEQ ID NO: 1770 - DNA, 17 bp, synthetic construct
  misc_feature 1..17: note = Oligonucleotide
  source 1..17: mol_type = other DNA
ggctggacctacttttc

SEQ ID NO: 1771 - DNA, 17 bp, synthetic construct
  misc_feature 1..17: note = Oligonucleotide
  source 1..17: mol_type = other DNA
taaggctggacctactt

SEQ ID NO: 1772 - DNA, 17 bp, synthetic construct
  misc_feature 1..17: note = Oligonucleotide
  source 1..17: mol_type = other DNA
gcttaaggctggaccta

SEQ ID NO: 1773 - DNA, 17 bp, synthetic construct
  misc_feature 1..17: note = Oligonucleotide
  source 1..17: mol_type = other DNA
gctgcttaaggctggac

SEQ ID NO: 1774 - DNA, 17 bp, synthetic construct
  misc_feature 1..17: note = Oligonucleotide
  source 1..17: mol_type = other DNA
tgtgctgcttaaggctg

SEQ ID NO: 1775 - DNA, 17 bp, synthetic construct
  misc_feature 1..17: note = Oligonucleotide
  source 1..17: mol_type = other DNA
atctgtgctgcttaagg

SEQ ID NO: 1776 - DNA, 17 bp, synthetic construct
  misc_feature 1..17: note = Oligonucleotide
  source 1..17: mol_type = other DNA
cgcatctgtgctgctta

SEQ ID NO: 1777 - DNA, 17 bp, synthetic construct
  misc_feature 1..17: note = Oligonucleotide
  source 1..17: mol_type = other DNA
cagcgcatctgtgctgc

SEQ ID NO: 1778 - DNA, 17 bp, synthetic construct
  misc_feature 1..17: note = Oligonucleotide
  source 1..17: mol_type = other DNA
taccagcgcatctgtgc

SEQ ID NO: 1779 - DNA, 17 bp, synthetic construct
  misc_feature 1..17: note = Oligonucleotide
  source 1..17: mol_type = other DNA
atctaccagcgcatctg

SEQ ID NO: 1780 - DNA, 17 bp, synthetic construct
  misc_feature 1..17: note = Oligonucleotide
  source 1..17: mol_type = other DNA
tgcatctaccagcgcat

SEQ ID NO: 1781 - DNA, 17 bp, synthetic construct
  misc_feature 1..17: note = Oligonucleotide
  source 1..17: mol_type = other DNA
ctatgcatctaccagcg

SEQ ID NO: 1782 - DNA, 17 bp, synthetic construct
  misc_feature 1..17: note = Oligonucleotide
  source 1..17: mol_type = other DNA
tgactatgcatctacca

SEQ ID NO: 1783 - DNA, 17 bp, synthetic construct
  misc_feature 1..17: note = Oligonucleotide
  source 1..17: mol_type = other DNA
tcctgactatgcatcta

SEQ ID NO: 1784 - DNA, 17 bp, synthetic construct
  misc_feature 1..17: note = Oligonucleotide
  source 1..17: mol_type = other DNA
agttcctgactatgcat

SEQ ID NO: 1785 - DNA, 17 bp, synthetic construct
  misc_feature 1..17: note = Oligonucleotide
  source 1..17: mol_type = other DNA
aaaagttcctgactatg

SEQ ID NO: 1786 - DNA, 17 bp, synthetic construct
  misc_feature 1..17: note = Oligonucleotide
  source 1..17: mol_type = other DNA
aaaaaaagttcctgact

SEQ ID NO: 1787 - DNA, 17 bp, synthetic construct
  misc_feature 1..17: note = Oligonucleotide
  source 1..17: mol_type = other DNA
aataaaaaaagttcctg

SEQ ID NO: 1788 - DNA, 17 bp, synthetic construct
  misc_feature 1..17: note = Oligonucleotide
  source 1..17: mol_type = other DNA
agaaataaaaaaagttc

SEQ ID NO: 1789 - DNA, 17 bp, synthetic construct
  misc_feature 1..17: note = Oligonucleotide
  source 1..17: mol_type = other DNA
aaaagaaataaaaaaag

SEQ ID NO: 1790 - DNA, 17 bp, synthetic construct
  misc_feature 1..17: note = Oligonucleotide
  source 1..17: mol_type = other DNA
cctaaaagaaataaaaa

SEQ ID NO: 1791 - DNA, 17 bp, synthetic construct
  misc_feature 1..17: note = Oligonucleotide
  source 1..17: mol_type = other DNA
agacctaaaagaaataa

SEQ ID NO: 1792 - DNA, 17 bp, synthetic construct
  misc_feature 1..17: note = Oligonucleotide
  source 1..17: mol_type = other DNA
cctagacctaaaagaaa

SEQ ID NO: 1793 - DNA, 17 bp, synthetic construct
  misc_feature 1..17: note = Oligonucleotide
  source 1..17: mol_type = other DNA
gtccctagacctaaaag

SEQ ID NO: 1794 - DNA, 17 bp, synthetic construct
  misc_feature 1..17: note = Oligonucleotide
  source 1..17: mol_type = other DNA
cctgtccctagacctaa

SEQ ID NO: 1795 - DNA, 17 bp, synthetic construct
  misc_feature 1..17: note = Oligonucleotide
  source 1..17: mol_type = other DNA
actcctgtccctagacc

SEQ ID NO: 1796 - DNA, 17 bp, synthetic construct
  misc_feature 1..17: note = Oligonucleotide
  source 1..17: mol_type = other DNA
ttcactcctgtccctag

SEQ ID NO: 1797 - DNA, 17 bp, synthetic construct
  misc_feature 1..17: note = Oligonucleotide
  source 1..17: mol_type = other DNA
ctattcactcctgtccc

SEQ ID NO: 1798 - DNA, 17 bp, synthetic construct
  misc_feature 1..17: note = Oligonucleotide
  source 1..17: mol_type = other DNA
tttctattcactcctgt

SEQ ID NO: 1799 - DNA, 17 bp, synthetic construct
  misc_feature 1..17: note = Oligonucleotide
  source 1..17: mol_type = other DNA
ccctttctattcactcc

SEQ ID NO: 1800 - DNA, 17 bp, synthetic construct
  misc_feature 1..17: note = Oligonucleotide
  source 1..17: mol_type = other DNA
cctccctttctattcac

SEQ ID NO: 1801 - DNA, 17 bp, synthetic construct
  misc_feature 1..17: note = Oligonucleotide
  source 1..17: mol_type = other DNA
tctcctccctttctatt

SEQ ID NO: 1802 - DNA, 17 bp, synthetic construct
  misc_feature 1..17: note = Oligonucleotide
  source 1..17: mol_type = other DNA
agctctcctccctttct

SEQ ID NO: 1803 - DNA, 17 bp, synthetic construct
  misc_feature 1..17: note = Oligonucleotide
  source 1..17: mol_type = other DNA
tagagctctcctccctt

SEQ ID NO: 1804 - DNA, 17 bp, synthetic construct
  misc_feature 1..17: note = Oligonucleotide
  source 1..17: mol_type = other DNA
taatagagctctcctcc

SEQ ID NO: 1805 - DNA, 17 bp, synthetic construct
  misc_feature 1..17: note = Oligonucleotide
  source 1..17: mol_type = other DNA
acataatagagctctcc

SEQ ID NO: 1806 - DNA, 17 bp, synthetic construct
  misc_feature 1..17: note = Oligonucleotide
  source 1..17: mol_type = other DNA
agaacataatagagctc

SEQ ID NO: 1807 - DNA, 17 bp, synthetic construct
  misc_feature 1..17: note = Oligonucleotide
  source 1..17: mol_type = other DNA
tatagaacataatagag

SEQ ID NO: 1808 - DNA, 17 bp, synthetic construct
  misc_feature 1..17: note = Oligonucleotide
  source 1..17: mol_type = other DNA
gtgtatagaacataata

SEQ ID NO: 1809 - DNA, 17 bp, synthetic construct
  misc_feature 1..17: note = Oligonucleotide
  source 1..17: mol_type = other DNA
tctgtgtatagaacata

SEQ ID NO: 1810 - DNA, 17 bp, synthetic construct
  misc_feature 1..17: note = Oligonucleotide
  source 1..17: mol_type = other DNA
taatctgtgtatagaac

SEQ ID NO: 1811 - DNA, 17 bp, synthetic construct
  misc_feature 1..17: note = Oligonucleotide
  source 1..17: mol_type = other DNA
tcctaatctgtgtatag

SEQ ID NO: 1812 - DNA, 17 bp, synthetic construct
  misc_feature 1..17: note = Oligonucleotide
  source 1..17: mol_type = other DNA
atctcctaatctgtgta

SEQ ID NO: 1813 - DNA, 17 bp, synthetic construct
  misc_feature 1..17: note = Oligonucleotide
  source 1..17: mol_type = other DNA
gtcatctcctaatctgt

SEQ ID NO: 1814 - DNA, 17 bp, synthetic construct
  misc_feature 1..17: note = Oligonucleotide
  source 1..17: mol_type = other DNA
aaggtcatctcctaatc

SEQ ID NO: 1815 - DNA, 17 bp, synthetic construct
  misc_feature 1..17: note = Oligonucleotide
  source 1..17: mol_type = other DNA
agtaaggtcatctccta

SEQ ID NO: 1816 - DNA, 17 bp, synthetic construct
  misc_feature 1..17: note = Oligonucleotide
  source 1..17: mol_type = other DNA
cccagtaaggtcatctc

SEQ ID NO: 1817 - DNA, 17 bp, synthetic construct
  misc_feature 1..17: note = Oligonucleotide
  source 1..17: mol_type = other DNA
gtacccagtaaggtcat

SEQ ID NO: 1818 - DNA, 17 bp, synthetic construct
  misc_feature 1..17: note = Oligonucleotide
  source 1..17: mol_type = other DNA
ggtgtacccagtaaggt

SEQ ID NO: 1819 - DNA, 17 bp, synthetic construct
  misc_feature 1..17: note = Oligonucleotide
  source 1..17: mol_type = other DNA
aggggtgtacccagtaa

SEQ ID NO: 1820 - DNA, 17 bp, synthetic construct
  misc_feature 1..17: note = Oligonucleotide
  source 1..17: mol_type = other DNA
tagaggggtgtacccag

SEQ ID NO: 1821 - DNA, 17 bp, synthetic construct
  misc_feature 1..17: note = Oligonucleotide
  source 1..17: mol_type = other DNA
ggttagaggggtgtacc

SEQ ID NO: 1822 - DNA, 17 bp, synthetic construct
  misc_feature 1..17: note = Oligonucleotide
  source 1..17: mol_type = other DNA
actggttagaggggtgt

SEQ ID NO: 1823 - DNA, 17 bp, synthetic construct
  misc_feature 1..17: note = Oligonucleotide
  source 1..17: mol_type = other DNA
agcactggttagagggg

SEQ ID NO: 1824 - DNA, 17 bp, synthetic construct
  misc_feature 1..17: note = Oligonucleotide
  source 1..17: mol_type = other DNA
gtaagcactggttagag

SEQ ID NO: 1825 - DNA, 17 bp, synthetic construct
  misc_feature 1..17: note = Oligonucleotide
  source 1..17: mol_type = other DNA
cctgtaagcactggtta

SEQ ID NO: 1826 - DNA, 17 bp, synthetic construct
  misc_feature 1..17: note = Oligonucleotide
  source 1..17: mol_type = other DNA
taacctgtaagcactgg

SEQ ID NO: 1827 - DNA, 17 bp, synthetic construct
  misc_feature 1..17: note = Oligonucleotide
  source 1..17: mol_type = other DNA
cattaacctgtaagcac

SEQ ID NO: 1828 - DNA, 17 bp, synthetic construct
  misc_feature 1..17: note = Oligonucleotide
  source 1..17: mol_type = other DNA
atgcattaacctgtaag

SEQ ID NO: 1829 - DNA, 17 bp, synthetic construct
  misc_feature 1..17: note = Oligonucleotide
  source 1..17: mol_type = other DNA
aacatgcattaacctgt

SEQ ID NO: 1830 - DNA, 17 bp, synthetic construct
  misc_feature 1..17: note = Oligonucleotide
  source 1..17: mol_type = other DNA
attaacatgcattaacc

SEQ ID NO: 1831 - DNA, 17 bp, synthetic construct
  misc_feature 1..17: note = Oligonucleotide
  source 1..17: mol_type = other DNA
ttcattaacatgcatta

SEQ ID NO: 1832 - DNA, 17 bp, synthetic construct
  misc_feature 1..17: note = Oligonucleotide
  source 1..17: mol_type = other DNA
atattcattaacatgca

SEQ ID NO: 1833 - DNA, 17 bp, synthetic construct
  misc_feature 1..17: note = Oligonucleotide
  source 1..17: mol_type = other DNA
aaaatattcattaacat

SEQ ID NO: 1834 - DNA, 17 bp, synthetic construct
  misc_feature 1..17: note = Oligonucleotide
  source 1..17: mol_type = other DNA
gcaaaaatattcattaa

SEQ ID NO: 1835 - DNA, 17 bp, synthetic construct
  misc_feature 1..17: note = Oligonucleotide
  source 1..17: mol_type = other DNA
actgcaaaaatattcat

SEQ ID NO: 1836 - DNA, 17 bp, synthetic construct
  misc_feature 1..17: note = Oligonucleotide
  source 1..17: mol_type = other DNA
acaactgcaaaaatatt

SEQ ID NO: 1837 - DNA, 17 bp, synthetic construct
  misc_feature 1..17: note = Oligonucleotide
  source 1..17: mol_type = other DNA
tttacaactgcaaaaat

SEQ ID NO: 1838 - DNA, 17 bp, synthetic construct
  misc_feature 1..17: note = Oligonucleotide
  source 1..17: mol_type = other DNA
tgctttacaactgcaaa

SEQ ID NO: 1839 - DNA, 17 bp, synthetic construct
  misc_feature 1..17: note = Oligonucleotide
  source 1..17: mol_type = other DNA
ttatgctttacaactgc

SEQ ID NO: 1840 - DNA, 17 bp, synthetic construct
  misc_feature 1..17: note = Oligonucleotide
  source 1..17: mol_type = other DNA
ttgttatgctttacaac

SEQ ID NO: 1841 - DNA, 17 bp, synthetic construct
  misc_feature 1..17: note = Oligonucleotide
  source 1..17: mol_type = other DNA
taattgttatgctttac

SEQ ID NO: 1842 - DNA, 17 bp, synthetic construct
  misc_feature 1..17: note = Oligonucleotide
  source 1..17: mol_type = other DNA
ttgtaattgttatgctt

SEQ ID NO: 1843 - DNA, 17 bp, synthetic construct
  misc_feature 1..17: note = Oligonucleotide
  source 1..17: mol_type = other DNA
tagttgtaattgttatg

SEQ ID NO: 1844 - DNA, 17 bp, synthetic construct
  misc_feature 1..17: note = Oligonucleotide
  source 1..17: mol_type = other DNA
gtgtagttgtaattgtt

SEQ ID NO: 1845 - DNA, 17 bp, synthetic construct
  misc_feature 1..17: note = Oligonucleotide
  source 1..17: mol_type = other DNA
gatgtgtagttgtaatt

SEQ ID NO: 1846 - DNA, 17 bp, synthetic construct
  misc_feature 1..17: note = Oligonucleotide
  source 1..17: mol_type = other DNA
atagatgtgtagttgta

SEQ ID NO: 1847 - DNA, 17 bp, synthetic construct
  misc_feature 1..17: note = Oligonucleotide
  source 1..17: mol_type = other DNA
gaaatagatgtgtagtt

SEQ ID NO: 1848 - DNA, 17 bp, synthetic construct
  misc_feature 1..17: note = Oligonucleotide
  source 1..17: mol_type = other DNA
ttagaaatagatgtgta

SEQ ID NO: 1849 - DNA, 17 bp, synthetic construct
  misc_feature 1..17: note = Oligonucleotide
  source 1..17: mol_type = other DNA
tctttagaaatagatgt

SEQ ID NO: 1850 - DNA, 17 bp, synthetic construct
  misc_feature 1..17: note = Oligonucleotide
  source 1..17: mol_type = other DNA
tattctttagaaataga

SEQ ID NO: 1851 - DNA, 17 bp, synthetic construct
  misc_feature 1..17: note = Oligonucleotide
  source 1..17: mol_type = other DNA
ttttattctttagaaat

SEQ ID NO: 1852 - DNA, 17 bp, synthetic construct
  misc_feature 1..17: note = Oligonucleotide
  source 1..17: mol_type = other DNA
ctgttttattctttaga

SEQ ID NO: 1853 - DNA, 17 bp, synthetic construct
  misc_feature 1..17: note = Oligonucleotide
  source 1..17: mol_type = other DNA
gtcctgttttattcttt

SEQ ID NO: 1854 - DNA, 17 bp, synthetic construct
  misc_feature 1..17: note = Oligonucleotide
  source 1..17: mol_type = other DNA
atggtcctgttttattc

SEQ ID NO: 1855 - DNA, 17 bp, synthetic construct
  misc_feature 1..17: note = Oligonucleotide
  source 1..17: mol_type = other DNA
aatatggtcctgtttta

SEQ ID NO: 1856 - DNA, 17 bp, synthetic construct
  misc_feature 1..17: note = Oligonucleotide
  source 1..17: mol_type = other DNA
ataaatatggtcctgtt

SEQ ID NO: 1857 - DNA, 17 bp, synthetic construct
  misc_feature 1..17: note = Oligonucleotide
  source 1..17: mol_type = other DNA
taaataaatatggtcct

SEQ ID NO: 1858 - DNA, 17 bp, synthetic construct
  misc_feature 1..17: note = Oligonucleotide
  source 1..17: mol_type = other DNA
aagtaaataaatatggt

SEQ ID NO: 1859 - DNA, 17 bp, synthetic construct
  misc_feature 1..17: note = Oligonucleotide
  source 1..17: mol_type = other DNA
cagaagtaaataaatat

SEQ ID NO: 1860 - DNA, 17 bp, synthetic construct
  misc_feature 1..17: note = Oligonucleotide
  source 1..17: mol_type = other DNA
tgacagaagtaaataaa

SEQ ID NO: 1861 - DNA, 17 bp, synthetic construct
  misc_feature 1..17: note = Oligonucleotide
  source 1..17: mol_type = other DNA
agttgacagaagtaaat

SEQ ID NO: 1862 - DNA, 17 bp, synthetic construct
  misc_feature 1..17: note = Oligonucleotide
  source 1..17: mol_type = other DNA
tatagttgacagaagta

SEQ ID NO: 1863 - DNA, 17 bp, synthetic construct
  misc_feature 1..17: note = Oligonucleotide
  source 1..17: mol_type = other DNA
ttctatagttgacagaa

SEQ ID NO: 1864 - DNA, 17 bp, synthetic construct
  misc_feature 1..17: note = Oligonucleotide
  source 1..17: mol_type = other DNA
tctttctatagttgaca

SEQ ID NO: 1865 - DNA, 17 bp, synthetic construct
  misc_feature 1..17: note = Oligonucleotide
  source 1..17: mol_type = other DNA
ctttctttctatagttg

SEQ ID NO: 1866 - DNA, 17 bp, synthetic construct
  misc_feature 1..17: note = Oligonucleotide
  source 1..17: mol_type = other DNA
ggtctttctttctatag

SEQ ID NO: 1867 - DNA, 17 bp, synthetic construct
  misc_feature 1..17: note = Oligonucleotide
  source 1..17: mol_type = other DNA
gaaggtctttctttcta

SEQ ID NO: 1868 - DNA, 17 bp, synthetic construct
  misc_feature 1..17: note = Oligonucleotide
  source 1..17: mol_type = other DNA
gctgaaggtctttcttt

SEQ ID NO: 1869 - DNA, 17 bp, synthetic construct
  misc_feature 1..17: note = Oligonucleotide
  source 1..17: mol_type = other DNA
acagctgaaggtctttc

SEQ ID NO: 1870 - DNA, 17 bp, synthetic construct
  misc_feature 1..17: note = Oligonucleotide
  source 1..17: mol_type = other DNA
aatacagctgaaggtct

SEQ ID NO: 1871 - DNA, 17 bp, synthetic construct
  misc_feature 1..17: note = Oligonucleotide
  source 1..17: mol_type = other DNA
ggaaatacagctgaagg

SEQ ID NO: 1872 - DNA, 17 bp, synthetic construct
  misc_feature 1..17: note = Oligonucleotide
  source 1..17: mol_type = other DNA
tgtggaaatacagctga

SEQ ID NO: 1873 - DNA, 17 bp, synthetic construct
  misc_feature 1..17: note = Oligonucleotide
  source 1..17: mol_type = other DNA
atctgtggaaatacagc

SEQ ID NO: 1874 - DNA, 17 bp, synthetic construct
  misc_feature 1..17: note = Oligonucleotide
  source 1..17: mol_type = other DNA
gaaatctgtggaaatac

SEQ ID NO: 1875 - DNA, 17 bp, synthetic construct
  misc_feature 1..17: note = Oligonucleotide
  source 1..17: mol_type = other DNA
ggagaaatctgtggaaa

SEQ ID NO: 1876 - DNA, 17 bp, synthetic construct
  misc_feature 1..17: note = Oligonucleotide
  source 1..17: mol_type = other DNA
ttgggagaaatctgtgg

SEQ ID NO: 1877 - DNA, 17 bp, synthetic construct
  misc_feature 1..17: note = Oligonucleotide
  source 1..17: mol_type = other DNA
tccttgggagaaatctg

SEQ ID NO: 1878 - DNA, 17 bp, synthetic construct
  misc_feature 1..17: note = Oligonucleotide
  source 1..17: mol_type = other DNA
ttttccttgggagaaat

SEQ ID NO: 1879 - DNA, 17 bp, synthetic construct
  misc_feature 1..17: note = Oligonucleotide
  source 1..17: mol_type = other DNA
gccttttccttgggaga

SEQ ID NO: 1880 - DNA, 17 bp, synthetic construct
  misc_feature 1..17: note = Oligonucleotide
  source 1..17: mol_type = other DNA
ttagccttttccttggg

SEQ ID NO: 1881 - DNA, 17 bp, synthetic construct
  misc_feature 1..17: note = Oligonucleotide
  source 1..17: mol_type = other DNA
atattagccttttcctt

SEQ ID NO: 1882 - DNA, 17 bp, synthetic construct
  misc_feature 1..17: note = Oligonucleotide
  source 1..17: mol_type = other DNA
ctaatattagccttttc

SEQ ID NO: 1883 - DNA, 17 bp, synthetic construct
  misc_feature 1..17: note = Oligonucleotide
  source 1..17: mol_type = other DNA
tgactaatattagcctt

SEQ ID NO: 1884 - DNA, 17 bp, synthetic construct
  misc_feature 1..17: note = Oligonucleotide
  source 1..17: mol_type = other DNA
tagtgactaatattagc

SEQ ID NO: 1885 - DNA, 17 bp, synthetic construct
  misc_feature 1..17: note = Oligonucleotide
  source 1..17: mol_type = other DNA
cagtagtgactaatatt

SEQ ID NO: 1886 - DNA, 17 bp, synthetic construct
  misc_feature 1..17: note = Oligonucleotide
  source 1..17: mol_type = other DNA
taacagtagtgactaat

SEQ ID NO: 1887 - DNA, 17 bp, synthetic construct
  misc_feature 1..17: note = Oligonucleotide
  source 1..17: mol_type = other DNA
tgataacagtagtgact

SEQ ID NO: 1888 - DNA, 17 bp, synthetic construct
  misc_feature 1..17: note = Oligonucleotide
  source 1..17: mol_type = other DNA
atgtgataacagtagtg

SEQ ID NO: 1889 - DNA, 17 bp, synthetic construct
  misc_feature 1..17: note = Oligonucleotide
  source 1..17: mol_type = other DNA
gggatgtgataacagta

SEQ ID NO: 1890 - DNA, 17 bp, synthetic construct
  misc_feature 1..17: note = Oligonucleotide
  source 1..17: mol_type = other DNA
aaagggatgtgataaca

SEQ ID NO: 1891 - DNA, 17 bp, synthetic construct
  misc_feature 1..17: note = Oligonucleotide
  source 1..17: mol_type = other DNA
tacaaagggatgtgata

SEQ ID NO: 1892 - DNA, 17 bp, synthetic construct
  misc_feature 1..17: note = Oligonucleotide
  source 1..17: mol_type = other DNA
ttatacaaagggatgtg

SEQ ID NO: 1893 - DNA, 17 bp, synthetic construct
  misc_feature 1..17: note = Oligonucleotide
  source 1..17: mol_type = other DNA
aacttatacaaagggat

SEQ ID NO: 1894 - DNA, 17 bp, synthetic construct
  misc_feature 1..17: note = Oligonucleotide
  source 1..17: mol_type = other DNA
taaaacttatacaaagg

SEQ ID NO: 1895 - DNA, 17 bp, synthetic construct
  misc_feature 1..17: note = Oligonucleotide
  source 1..17: mol_type = other DNA
ttttaaaacttatacaa

SEQ ID NO: 1896 - DNA, 17 bp, synthetic construct
  misc_feature 1..17: note = Oligonucleotide
  source 1..17: mol_type = other DNA
tctttttaaaacttata

SEQ ID NO: 1897 - DNA, 17 bp, synthetic construct
  misc_feature 1..17: note = Oligonucleotide
  source 1..17: mol_type = other DNA
atctctttttaaaactt

SEQ ID NO: 1898 - DNA, 17 bp, synthetic construct
  misc_feature 1..17: note = Oligonucleotide
  source 1..17: mol_type = other DNA
tccatctctttttaaaa

SEQ ID NO: 1899 - DNA, 17 bp, synthetic construct
  misc_feature 1..17: note = Oligonucleotide
  source 1..17: mol_type = other DNA
ccctccatctcttttta

SEQ ID NO: 1900 - DNA, 17 bp, synthetic construct
  misc_feature 1..17: note = Oligonucleotide
  source 1..17: mol_type = other DNA
tctccctccatctcttt

SEQ ID NO: 1901 - DNA, 17 bp, synthetic construct
  misc_feature 1..17: note = Oligonucleotide
  source 1..17: mol_type = other DNA
agatctccctccatctc

SEQ ID NO: 1902 - DNA, 17 bp, synthetic construct
  misc_feature 1..17: note = Oligonucleotide
  source 1..17: mol_type = other DNA
tgaagatctccctccat

SEQ ID NO: 1903 - DNA, 17 bp, synthetic construct
  misc_feature 1..17: note = Oligonucleotide
  source 1..17: mol_type = other DNA
aaatgaagatctccctc

SEQ ID NO: 1904 - DNA, 17 bp, synthetic construct
  misc_feature 1..17: note = Oligonucleotide
  source 1..17: mol_type = other DNA
aagaaatgaagatctcc

SEQ ID NO: 1905 - DNA, 17 bp, synthetic construct
  misc_feature 1..17: note = Oligonucleotide
  source 1..17: mol_type = other DNA
tcaaagaaatgaagatc

SEQ ID NO: 1906 - DNA, 17 bp, synthetic construct
  misc_feature 1..17: note = Oligonucleotide
  source 1..17: mol_type = other DNA
tcctcaaagaaatgaag

SEQ ID NO: 1907 - DNA, 17 bp, synthetic construct
  misc_feature 1..17: note = Oligonucleotide
  source 1..17: mol_type = other DNA
atctcctcaaagaaatg

SEQ ID NO: 1908 - DNA, 17 bp, synthetic construct
  misc_feature 1..17: note = Oligonucleotide
  source 1..17: mol_type = other DNA
ctgatctcctcaaagaa

SEQ ID NO: 1909 - DNA, 17 bp, synthetic construct
  misc_feature 1..17: note = Oligonucleotide
  source 1..17: mol_type = other DNA
atactgatctcctcaaa

SEQ ID NO: 1910 - DNA, 17 bp, synthetic construct
  misc_feature 1..17: note = Oligonucleotide
  source 1..17: mol_type = other DNA
acaatactgatctcctc

SEQ ID NO: 1911 - DNA, 17 bp, synthetic construct
  misc_feature 1..17: note = Oligonucleotide
  source 1..17: mol_type = other DNA
gttacaatactgatctc

SEQ ID NO: 1912 - DNA, 17 bp, synthetic construct
  misc_feature 1..17: note = Oligonucleotide
  source 1..17: mol_type = other DNA
tacgttacaatactgat

SEQ ID NO: 1913 - DNA, 17 bp, synthetic construct
  misc_feature 1..17: note = Oligonucleotide
  source 1..17: mol_type = other DNA
acatacgttacaatact

SEQ ID NO: 1914 - DNA, 17 bp, synthetic construct
  misc_feature 1..17: note = Oligonucleotide
  source 1..17: mol_type = other DNA
ttcacatacgttacaat

SEQ ID NO: 1915 - DNA, 17 bp, synthetic construct
  misc_feature 1..17: note = Oligonucleotide
  source 1..17: mol_type = other DNA
ctattcacatacgttac

SEQ ID NO: 1916 - DNA, 17 bp, synthetic construct
  misc_feature 1..17: note = Oligonucleotide
  source 1..17: mol_type = other DNA
catctattcacatacgt

SEQ ID NO: 1917 - DNA, 17 bp, synthetic construct
  misc_feature 1..17: note = Oligonucleotide
  source 1..17: mol_type = other DNA
tatcatctattcacata

SEQ ID NO: 1918 - DNA, 17 bp, synthetic construct
  misc_feature 1..17: note = Oligonucleotide
  source 1..17: mol_type = other DNA
tgttatcatctattcac

SEQ ID NO: 1919 - DNA, 17 bp, synthetic construct
  misc_feature 1..17: note = Oligonucleotide
  source 1..17: mol_type = other DNA
aattgttatcatctatt

SEQ ID NO: 1920 - DNA, 17 bp, synthetic construct
  misc_feature 1..17: note = Oligonucleotide
  source 1..17: mol_type = other DNA
attaattgttatcatct

SEQ ID NO: 1921 - DNA, 17 bp, synthetic construct
  misc_feature 1..17: note = Oligonucleotide
  source 1..17: mol_type = other DNA
aatattaattgttatca

SEQ ID NO: 1922 - DNA, 17 bp, synthetic construct
  misc_feature 1..17: note = Oligonucleotide
  source 1..17: mol_type = other DNA
agtaatattaattgtta

SEQ ID NO: 1923 - DNA, 17 bp, synthetic construct
  misc_feature 1..17: note = Oligonucleotide
  source 1..17: mol_type = other DNA
tttagtaatattaattg

SEQ ID NO: 1924 - DNA, 17 bp, synthetic construct
  misc_feature 1..17: note = Oligonucleotide
  source 1..17: mol_type = other DNA
acttttagtaatattaa

SEQ ID NO: 1925 - DNA, 17 bp, synthetic construct
  misc_feature 1..17: note = Oligonucleotide
  source 1..17: mol_type = other DNA
gggacttttagtaatat

SEQ ID NO: 1926 - DNA, 17 bp, synthetic construct
  misc_feature 1..17: note = Oligonucleotide
  source 1..17: mol_type = other DNA
tgtgggacttttagtaa

SEQ ID NO: 1927 - DNA, 17 bp, synthetic construct
  misc_feature 1..17: note = Oligonucleotide
  source 1..17: mol_type = other DNA
tcatgtgggacttttag

SEQ ID NO: 1928 - DNA, 17 bp, synthetic construct
  misc_feature 1..17: note = Oligonucleotide
  source 1..17: mol_type = other DNA
ctctcatgtgggacttt

SEQ ID NO: 1929 - DNA, 17 bp, synthetic construct
  misc_feature 1..17: note = Oligonucleotide
  source 1..17: mol_type = other DNA
ggactctcatgtgggac

SEQ ID NO: 1930 - DNA, 17 bp, synthetic construct
  misc_feature 1..17: note = Oligonucleotide
  source 1..17: mol_type = other DNA
tcaggactctcatgtgg

SEQ ID NO: 1931 - DNA, 17 bp, synthetic construct
  misc_feature 1..17: note = Oligonucleotide
  source 1..17: mol_type = other DNA
gcgtcaggactctcatg

SEQ ID NO: 1932 - DNA, 17 bp, synthetic construct
  misc_feature 1..17: note = Oligonucleotide
  source 1..17: mol_type = other DNA
agggcgtcaggactctc

SEQ ID NO: 1933 - DNA, 17 bp, synthetic construct
  misc_feature 1..17: note = Oligonucleotide
  source 1..17: mol_type = other DNA
gagagggcgtcaggact

SEQ ID NO: 1934 - DNA, 17 bp, synthetic construct
  misc_feature 1..17: note = Oligonucleotide
  source 1..17: mol_type = other DNA
atggagagggcgtcagg

SEQ ID NO: 1935 - DNA, 17 bp, synthetic construct
  misc_feature 1..17: note = Oligonucleotide
  source 1..17: mol_type = other DNA
ggcatggagagggcgtc

SEQ ID NO: 1936 - DNA, 17 bp, synthetic construct
  misc_feature 1..17: note = Oligonucleotide
  source 1..17: mol_type = other DNA
tggggcatggagagggc

SEQ ID NO: 1937 - DNA, 17 bp, synthetic construct
  misc_feature 1..17: note = Oligonucleotide
  source 1..17: mol_type = other DNA
ctgtggggcatggagag

SEQ ID NO: 1938 - DNA, 17 bp, synthetic construct
  misc_feature 1..17: note = Oligonucleotide
  source 1..17: mol_type = other DNA
ttactgtggggcatgga

SEQ ID NO: 1939 - DNA, 17 bp, synthetic construct
  misc_feature 1..17: note = Oligonucleotide
  source 1..17: mol_type = other DNA
acattactgtggggcat

SEQ ID NO: 1940 - DNA, 17 bp, synthetic construct
  misc_feature 1..17: note = Oligonucleotide
  source 1..17: mol_type = other DNA
gccacattactgtgggg

SEQ ID NO: 1941 - DNA, 17 bp, synthetic construct
  misc_feature 1..17: note = Oligonucleotide
  source 1..17: mol_type = other DNA
gaagccacattactgtg

SEQ ID NO: 1942 - DNA, 17 bp, synthetic construct
  misc_feature 1..17: note = Oligonucleotide
  source 1..17: mol_type = other DNA
aaagaagccacattact

SEQ ID NO: 1943 - DNA, 17 bp, synthetic construct
  misc_feature 1..17: note = Oligonucleotide
  source 1..17: mol_type = other DNA
atgaaagaagccacatt

SEQ ID NO: 1944 - DNA, 17 bp, synthetic construct
  misc_feature 1..17: note = Oligonucleotide
  source 1..17: mol_type = other DNA
cccatgaaagaagccac

SEQ ID NO: 1945 - DNA, 17 bp, synthetic construct
  misc_feature 1..17: note = Oligonucleotide
  source 1..17: mol_type = other DNA
aaacccatgaaagaagc

SEQ ID NO: 1946 - DNA, 17 bp, synthetic construct
  misc_feature 1..17: note = Oligonucleotide
  source 1..17: mol_type = other DNA
aaaaaacccatgaaaga

SEQ ID NO: 1947 - DNA, 17 bp, synthetic construct
  misc_feature 1..17: note = Oligonucleotide
  source 1..17: mol_type = other DNA
aaaaaaaaacccatgaa

SEQ ID NO: 1948 - DNA, 17 bp, synthetic construct
  misc_feature 1..17: note = Oligonucleotide
  source 1..17: mol_type = other DNA
aagaaaaaaaaacccat

SEQ ID NO: 1949 - DNA, 17 bp, synthetic construct
  misc_feature 1..17: note = Oligonucleotide
  source 1..17: mol_type = other DNA
aagaagaaaaaaaaacc

SEQ ID NO: 1950 - DNA, 17 bp, synthetic construct
  misc_feature 1..17: note = Oligonucleotide
  source 1..17: mol_type = other DNA
aaaaagaagaaaaaaaa

SEQ ID NO: 1951 - DNA, 17 bp, synthetic construct
  misc_feature 1..17: note = Oligonucleotide
  source 1..17: mol_type = other DNA
gctaaaaagaagaaaaa

SEQ ID NO: 1952 - DNA, 17 bp, synthetic construct
  misc_feature 1..17: note = Oligonucleotide
  source 1..17: mol_type = other DNA
tcagctaaaaagaagaa

SEQ ID NO: 1953 - DNA, 17 bp, synthetic construct
  misc_feature 1..17: note = Oligonucleotide
  source 1..17: mol_type = other DNA
agatcagctaaaaagaa

SEQ ID NO: 1954 - DNA, 17 bp, synthetic construct
  misc_feature 1..17: note = Oligonucleotide
  source 1..17: mol_type = other DNA
atgagatcagctaaaaa

SEQ ID NO: 1955 - DNA, 17 bp, synthetic construct
  misc_feature 1..17: note = Oligonucleotide
  source 1..17: mol_type = other DNA
aggatgagatcagctaa

SEQ ID NO: 1956 - DNA, 17 bp, synthetic construct
  misc_feature 1..17: note = Oligonucleotide
  source 1..17: mol_type = other DNA
cttaggatgagatcagc

SEQ ID NO: 1957 - DNA, 17 bp, synthetic construct
  misc_feature 1..17: note = Oligonucleotide
  source 1..17: mol_type = other DNA
atgcttaggatgagatc

SEQ ID NO: 1958 - DNA, 17 bp, synthetic construct
  misc_feature 1..17: note = Oligonucleotide
  source 1..17: mol_type = other DNA
agcatgcttaggatgag

SEQ ID NO: 1959 - DNA, 17 bp, synthetic construct
  misc_feature 1..17: note = Oligonucleotide
  source 1..17: mol_type = other DNA
taaagcatgcttaggat

SEQ ID NO: 1960 - DNA, 17 bp, synthetic construct
  misc_feature 1..17: note = Oligonucleotide
  source 1..17: mol_type = other DNA
aaataaagcatgcttag

SEQ ID NO: 1961 - DNA, 17 bp, synthetic construct
  misc_feature 1..17: note = Oligonucleotide
  source 1..17: mol_type = other DNA
gaaaaataaagcatgct

SEQ ID NO: 1962 - DNA, 17 bp, synthetic construct
  misc_feature 1..17: note = Oligonucleotide
  source 1..17: mol_type = other DNA
aaggaaaaataaagcat

SEQ ID NO: 1963 - DNA, 17 bp, synthetic construct
  misc_feature 1..17: note = Oligonucleotide
  source 1..17: mol_type = other DNA
ttcaaggaaaaataaag

SEQ ID NO: 1964 - DNA, 17 bp, synthetic construct
  misc_feature 1..17: note = Oligonucleotide
  source 1..17: mol_type = other DNA
gctttcaaggaaaaata

SEQ ID NO: 1965 - DNA, 17 bp, synthetic construct
  misc_feature 1..17: note = Oligonucleotide
  source 1..17: mol_type = other DNA
ctagctttcaaggaaaa

SEQ ID NO: 1966 - DNA, 17 bp, synthetic construct
  misc_feature 1..17: note = Oligonucleotide
  source 1..17: mol_type = other DNA
tacctagctttcaagga

SEQ ID NO: 1967 - DNA, 17 bp, synthetic construct
  misc_feature 1..17: note = Oligonucleotide
  source 1..17: mol_type = other DNA
aaatacctagctttcaa

SEQ ID NO: 1968 - DNA, 17 bp, synthetic construct
  misc_feature 1..17: note = Oligonucleotide
  source 1..17: mol_type = other DNA
gataaatacctagcttt

SEQ ID NO: 1969 - DNA, 17 bp, synthetic construct
  misc_feature 1..17: note = Oligonucleotide
  source 1..17: mol_type = other DNA
gttgataaatacctagc

SEQ ID NO: 1970 - DNA, 17 bp, synthetic construct
  misc_feature 1..17: note = Oligonucleotide
  source 1..17: mol_type = other DNA
gcagttgataaatacct

SEQ ID NO: 1971 - DNA, 17 bp, synthetic construct
  misc_feature 1..17: note = Oligonucleotide
  source 1..17: mol_type = other DNA
tctgcagttgataaata

SEQ ID NO: 1972 - DNA, 17 bp, synthetic construct
  misc_feature 1..17: note = Oligonucleotide
  source 1..17: mol_type = other DNA
acatctgcagttgataa

SEQ ID NO: 1973 - DNA, 17 bp, synthetic construct
  misc_feature 1..17: note = Oligonucleotide
  source 1..17: mol_type = other DNA
ataacatctgcagttga

SEQ ID NO: 1974 - DNA, 17 bp, synthetic construct
  misc_feature 1..17: note = Oligonucleotide
  source 1..17: mol_type = other DNA
tcaataacatctgcagt

SEQ ID NO: 1975 - DNA, 17 bp, synthetic construct
  misc_feature 1..17: note = Oligonucleotide
  source 1..17: mol_type = other DNA
ctttcaataacatctgc

SEQ ID NO: 1976 - DNA, 17 bp, synthetic construct
  misc_feature 1..17: note = Oligonucleotide
  source 1..17: mol_type = other DNA
tttctttcaataacatc

SEQ ID NO: 1977 - DNA, 17 bp, synthetic construct
  misc_feature 1..17: note = Oligonucleotide
  source 1..17: mol_type = other DNA
tattttctttcaataac

SEQ ID NO: 1978 - DNA, 17 bp, synthetic construct
  misc_feature 1..17: note = Oligonucleotide
  source 1..17: mol_type = other DNA
ttttattttctttcaat

SEQ ID NO: 1979 - DNA, 17 bp, synthetic construct
  misc_feature 1..17: note = Oligonucleotide
  source 1..17: mol_type = other DNA
gaattttattttctttc

SEQ ID NO: 1980 - DNA, 17 bp, synthetic construct
  misc_feature 1..17: note = Oligonucleotide
  source 1..17: mol_type = other DNA
actgaattttattttct

SEQ ID NO: 1981 - DNA, 17 bp, synthetic construct
  misc_feature 1..17: note = Oligonucleotide
  source 1..17: mol_type = other DNA
gagactgaattttattt

SEQ ID NO: 1982 - DNA, 17 bp, synthetic construct
  misc_feature 1..17: note = Oligonucleotide
  source 1..17: mol_type = other DNA
cttgagactgaatttta

SEQ ID NO: 1983 - DNA, 17 bp, synthetic construct
  misc_feature 1..17: note = Oligonucleotide
  source 1..17: mol_type = other DNA
actcttgagactgaatt

SEQ ID NO: 1984 - DNA, 17 bp, synthetic construct
  misc_feature 1..17: note = Oligonucleotide
  source 1..17: mol_type = other DNA
tttactcttgagactga

SEQ ID NO: 1985 - DNA, 17 bp, synthetic construct
  misc_feature 1..17: note = Oligonucleotide
  source 1..17: mol_type = other DNA
gggtttactcttgagac

SEQ ID NO: 1986 - DNA, 17 bp, synthetic construct
  misc_feature 1..17: note = Oligonucleotide
  source 1..17: mol_type = other DNA
acagggtttactcttga

SEQ ID NO: 1987 - DNA, 17 bp, synthetic construct
  misc_feature 1..17: note = Oligonucleotide
  source 1..17: mol_type = other DNA
gacacagggtttactct

SEQ ID NO: 1988 - DNA, 17 bp, synthetic construct
  misc_feature 1..17: note = Oligonucleotide
  source 1..17: mol_type = other DNA
caagacacagggtttac

SEQ ID NO: 1989 - DNA, 17 bp, synthetic construct
  misc_feature 1..17: note = Oligonucleotide
  source 1..17: mol_type = other DNA
acacaagacacagggtt

SEQ ID NO: 1990 - DNA, 17 bp, synthetic construct
  misc_feature 1..17: note = Oligonucleotide
  source 1..17: mol_type = other DNA
cagacacaagacacagg

SEQ ID NO: 1991 - DNA, 17 bp, synthetic construct
  misc_feature 1..17: note = Oligonucleotide
  source 1..17: mol_type = other DNA
ctacagacacaagacac

SEQ ID NO: 1992 - DNA, 17 bp, synthetic construct
  misc_feature 1..17: note = Oligonucleotide
  source 1..17: mol_type = other DNA
gaactacagacacaaga

SEQ ID NO: 1993 - DNA, 17 bp, synthetic construct
  misc_feature 1..17: note = Oligonucleotide
  source 1..17: mol_type = other DNA
tttgaactacagacaca

SEQ ID NO: 1994 - DNA, 17 bp, synthetic construct
  misc_feature 1..17: note = Oligonucleotide
  source 1..17: mol_type = other DNA
acttttgaactacagac

SEQ ID NO: 1995 - DNA, 17 bp, synthetic construct
  misc_feature 1..17: note = Oligonucleotide
  source 1..17: mol_type = other DNA
ctgacttttgaactaca

SEQ ID NO: 1996 - DNA, 17 bp, synthetic construct
  misc_feature 1..17: note = Oligonucleotide
  source 1..17: mol_type = other DNA
tttctgacttttgaact

SEQ ID NO: 1997 - DNA, 17 bp, synthetic construct
  misc_feature 1..17: note = Oligonucleotide
  source 1..17: mol_type = other DNA
tcatttctgacttttga

SEQ ID NO: 1998 - DNA, 17 bp, synthetic construct
  misc_feature 1..17: note = Oligonucleotide
  source 1..17: mol_type = other DNA
gaatcatttctgacttt

SEQ ID NO: 1999 - DNA, 17 bp, synthetic construct
  misc_feature 1..17: note = Oligonucleotide
  source 1..17: mol_type = other DNA
ttagaatcatttctgac

SEQ ID NO: 2000 - DNA, 17 bp, synthetic construct
  misc_feature 1..17: note = Oligonucleotide
  source 1..17: mol_type = other DNA
aaattagaatcatttct

SEQ ID NO: 2001 - DNA, 17 bp, synthetic construct
  misc_feature 1..17: note = Oligonucleotide
  source 1..17: mol_type = other DNA
tttaaattagaatcatt

SEQ ID NO: 2002 - DNA, 17 bp, synthetic construct
  misc_feature 1..17: note = Oligonucleotide
  source 1..17: mol_type = other DNA
ttgtttaaattagaatc

SEQ ID NO: 2003 - DNA, 17 bp, synthetic construct
  misc_feature 1..17: note = Oligonucleotide
  source 1..17: mol_type = other DNA
tttttgtttaaattaga

SEQ ID NO: 2004 - DNA, 17 bp, synthetic construct
  misc_feature 1..17: note = Oligonucleotide
  source 1..17: mol_type = other DNA
atctttttgtttaaatt

SEQ ID NO: 2005 - DNA, 17 bp, synthetic construct
  misc_feature 1..17: note = Oligonucleotide
  source 1..17: mol_type = other DNA
agtatctttttgtttaa

SEQ ID NO: 2006 - DNA, 17 bp, synthetic construct
  misc_feature 1..17: note = Oligonucleotide
  source 1..17: mol_type = other DNA
tttagtatctttttgtt

SEQ ID NO: 2007 - DNA, 17 bp, synthetic construct
  misc_feature 1..17: note = Oligonucleotide
  source 1..17: mol_type = other DNA
atatttagtatcttttt

SEQ ID NO: 2008 - DNA, 17 bp, synthetic construct
  misc_feature 1..17: note = Oligonucleotide
  source 1..17: mol_type = other DNA
tgtatatttagtatctt

SEQ ID NO: 2009 - DNA, 17 bp, synthetic construct
  misc_feature 1..17: note = Oligonucleotide
  source 1..17: mol_type = other DNA
ttctgtatatttagtat

SEQ ID NO: 2010 - DNA, 17 bp, synthetic construct
  misc_feature 1..17: note = Oligonucleotide
  source 1..17: mol_type = other DNA
aacttctgtatatttag

SEQ ID NO: 2011 - DNA, 17 bp, synthetic construct
  misc_feature 1..17: note = Oligonucleotide
  source 1..17: mol_type = other DNA
tttaacttctgtatatt

SEQ ID NO: 2012 - DNA, 17 bp, synthetic construct
  misc_feature 1..17: note = Oligonucleotide
  source 1..17: mol_type = other DNA
gaatttaacttctgtat

SEQ ID NO: 2013 - DNA, 17 bp, synthetic construct
  misc_feature 1..17: note = Oligonucleotide
  source 1..17: mol_type = other DNA
ttcgaatttaacttctg

SEQ ID NO: 2014 - DNA, 17 bp, synthetic construct
  misc_feature 1..17: note = Oligonucleotide
  source 1..17: mol_type = other DNA
tagttcgaatttaactt

SEQ ID NO: 2015 - DNA, 17 bp, synthetic construct
  misc_feature 1..17: note = Oligonucleotide
  source 1..17: mol_type = other DNA
ggctagttcgaatttaa

SEQ ID NO: 2016 - DNA, 17 bp, synthetic construct
  misc_feature 1..17: note = Oligonucleotide
  source 1..17: mol_type = other DNA
tgtggctagttcgaatt

SEQ ID NO: 2017 - DNA, 17 bp, synthetic construct
  misc_feature 1..17: note = Oligonucleotide
  source 1..17: mol_type = other DNA
ttctgtggctagttcga

SEQ ID NO: 2018 - DNA, 17 bp, synthetic construct
  misc_feature 1..17: note = Oligonucleotide
  source 1..17: mol_type = other DNA
tgattctgtggctagtt

SEQ ID NO: 2019 - DNA, 17 bp, synthetic construct
  misc_feature 1..17: note = Oligonucleotide
  source 1..17: mol_type = other DNA
aaatgattctgtggcta

SEQ ID NO: 2020 - DNA, 17 bp, synthetic construct
  misc_feature 1..17: note = Oligonucleotide
  source 1..17: mol_type = other DNA
aacaaatgattctgtgg

SEQ ID NO: 2021 - DNA, 17 bp, synthetic construct
  misc_feature 1..17: note = Oligonucleotide
  source 1..17: mol_type = other DNA
aaaaacaaatgattctg

SEQ ID NO: 2022 - DNA, 17 bp, synthetic construct
  misc_feature 1..17: note = Oligonucleotide
  source 1..17: mol_type = other DNA
cataaaaacaaatgatt

SEQ ID NO: 2023 - DNA, 17 bp, synthetic construct
  misc_feature 1..17: note = Oligonucleotide
  source 1..17: mol_type = other DNA
tgacataaaaacaaatg

SEQ ID NO: 2024 - DNA, 17 bp, synthetic construct
  misc_feature 1..17: note = Oligonucleotide
  source 1..17: mol_type = other DNA
ttctgacataaaaacaa

SEQ ID NO: 2025 - DNA, 17 bp, synthetic construct
  misc_feature 1..17: note = Oligonucleotide
  source 1..17: mol_type = other DNA
aaattctgacataaaaa

SEQ ID NO: 2026 - DNA, 17 bp, synthetic construct
  misc_feature 1..17: note = Oligonucleotide
  source 1..17: mol_type = other DNA
tgcaaattctgacataa

SEQ ID NO: 2027 - DNA, 17 bp, synthetic construct
  misc_feature 1..17: note = Oligonucleotide
  source 1..17: mol_type = other DNA
ctttgcaaattctgaca

SEQ ID NO: 2028 - DNA, 17 bp, synthetic construct
  misc_feature 1..17: note = Oligonucleotide
  source 1..17: mol_type = other DNA
actctttgcaaattctg

SEQ ID NO: 2029 - DNA, 17 bp, synthetic construct
  misc_feature 1..17: note = Oligonucleotide
  source 1..17: mol_type = other DNA
tccactctttgcaaatt

SEQ ID NO: 2030 - DNA, 17 bp, synthetic construct
  misc_feature 1..17: note = Oligonucleotide
  source 1..17: mol_type = other DNA
cactccactctttgcaa

SEQ ID NO: 2031 - DNA, 17 bp, synthetic construct
  misc_feature 1..17: note = Oligonucleotide
  source 1..17: mol_type = other DNA
gtccactccactctttg

SEQ ID NO: 2032 - DNA, 17 bp, synthetic construct
  misc_feature 1..17: note = Oligonucleotide
  source 1..17: mol_type = other DNA
tttgtccactccactct

SEQ ID NO: 2033 - DNA, 17 bp, synthetic construct
  misc_feature 1..17: note = Oligonucleotide
  source 1..17: mol_type = other DNA
agctttgtccactccac

SEQ ID NO: 2034 - DNA, 17 bp, synthetic construct
  misc_feature 1..17: note = Oligonucleotide
  source 1..17: mol_type = other DNA
cagagctttgtccactc

SEQ ID NO: 2035 - DNA, 17 bp, synthetic construct
  misc_feature 1..17: note = Oligonucleotide
  source 1..17: mol_type = other DNA
atacagagctttgtcca

SEQ ID NO: 2036 - DNA, 17 bp, synthetic construct
  misc_feature 1..17: note = Oligonucleotide
  source 1..17: mol_type = other DNA
tccatacagagctttgt

SEQ ID NO: 2037 - DNA, 17 bp, synthetic construct
  misc_feature 1..17: note = Oligonucleotide
  source 1..17: mol_type = other DNA
tcttccatacagagctt

SEQ ID NO: 2038 - DNA, 17 bp, synthetic construct
  misc_feature 1..17: note = Oligonucleotide
  source 1..17: mol_type = other DNA
cagtcttccatacagag

SEQ ID NO: 2039 - DNA, 17 bp, synthetic construct
  misc_feature 1..17: note = Oligonucleotide
  source 1..17: mol_type = other DNA
gttcagtcttccataca

SEQ ID NO: 2040 - DNA, 17 bp, synthetic construct
  misc_feature 1..17: note = Oligonucleotide
  source 1..17: mol_type = other DNA
gttgttcagtcttccat

SEQ ID NO: 2041 - DNA, 17 bp, synthetic construct
  misc_feature 1..17: note = Oligonucleotide
  source 1..17: mol_type = other DNA
acagttgttcagtcttc

SEQ ID NO: 2042 - DNA, 17 bp, synthetic construct
  misc_feature 1..17: note = Oligonucleotide
  source 1..17: mol_type = other DNA
tttacagttgttcagtc

SEQ ID NO: 2043 - DNA, 17 bp, synthetic construct
  misc_feature 1..17: note = Oligonucleotide
  source 1..17: mol_type = other DNA
ctatttacagttgttca

SEQ ID NO: 2044 - DNA, 17 bp, synthetic construct
  misc_feature 1..17: note = Oligonucleotide
  source 1..17: mol_type = other DNA
catctatttacagttgt

SEQ ID NO: 2045 - DNA, 17 bp, synthetic construct
  misc_feature 1..17: note = Oligonucleotide
  source 1..17: mol_type = other DNA
tatcatctatttacagt

SEQ ID NO: 2046 - DNA, 17 bp, synthetic construct
  misc_feature 1..17: note = Oligonucleotide
  source 1..17: mol_type = other DNA
ggatatcatctatttac

SEQ ID NO: 2047 - DNA, 17 bp, synthetic construct
  misc_feature 1..17: note = Oligonucleotide
  source 1..17: mol_type = other DNA
tttggatatcatctatt

SEQ ID NO: 2048 - DNA, 17 bp, synthetic construct
  misc_feature 1..17: note = Oligonucleotide
  source 1..17: mol_type = other DNA
aagtttggatatcatct

SEQ ID NO: 2049 - DNA, 17 bp, synthetic construct
  misc_feature 1..17: note = Oligonucleotide
  source 1..17: mol_type = other DNA
attaagtttggatatca

SEQ ID NO: 2050 - DNA, 17 bp, synthetic construct
  misc_feature 1..17: note = Oligonucleotide
  source 1..17: mol_type = other DNA
caaattaagtttggata

SEQ ID NO: 2051 - DNA, 17 bp, synthetic construct
  misc_feature 1..17: note = Oligonucleotide
  source 1..17: mol_type = other DNA
agccaaattaagtttgg

SEQ ID NO: 2052 - DNA, 17 bp, synthetic construct
  misc_feature 1..17: note = Oligonucleotide
  source 1..17: mol_type = other DNA
cctagccaaattaagtt

SEQ ID NO: 2053 - DNA, 17 bp, synthetic construct
  misc_feature 1..17: note = Oligonucleotide
  source 1..17: mol_type = other DNA
agtcctagccaaattaa

SEQ ID NO: 2054 - DNA, 17 bp, synthetic construct
  misc_feature 1..17: note = Oligonucleotide
  source 1..17: mol_type = other DNA
tgaagtcctagccaaat

SEQ ID NO: 2055 - DNA, 17 bp, synthetic construct
  misc_feature 1..17: note = Oligonucleotide
  source 1..17: mol_type = other DNA
aattgaagtcctagcca

SEQ ID NO: 2056 - DNA, 17 bp, synthetic construct
  misc_feature 1..17: note = Oligonucleotide
  source 1..17: mol_type = other DNA
taaaattgaagtcctag

SEQ ID NO: 2057 - DNA, 17 bp, synthetic construct
  misc_feature 1..17: note = Oligonucleotide
  source 1..17: mol_type = other DNA
ttttaaaattgaagtcc

SEQ ID NO: 2058 - DNA, 17 bp, synthetic construct
  misc_feature 1..17: note = Oligonucleotide
  source 1..17: mol_type = other DNA
gatttttaaaattgaag

SEQ ID NO: 2059 - DNA, 17 bp, synthetic construct
  misc_feature 1..17: note = Oligonucleotide
  source 1..17: mol_type = other DNA
actgatttttaaaattg

SEQ ID NO: 2060 - DNA, 17 bp, synthetic construct
  misc_feature 1..17: note = Oligonucleotide
  source 1..17: mol_type = other DNA
tacactgatttttaaaa

SEQ ID NO: 2061 - DNA, 17 bp, synthetic construct
  misc_feature 1..17: note = Oligonucleotide
  source 1..17: mol_type = other DNA
aggtacactgattttta

SEQ ID NO: 2062 - DNA, 17 bp, synthetic construct
  misc_feature 1..17: note = Oligonucleotide
  source 1..17: mol_type = other DNA
cctaggtacactgattt

SEQ ID NO: 2063 - DNA, 17 bp, synthetic construct
  misc_feature 1..17: note = Oligonucleotide
  source 1..17: mol_type = other DNA
ctgcctaggtacactga

SEQ ID NO: 2064 - DNA, 17 bp, synthetic construct
  misc_feature 1..17: note = Oligonucleotide
  source 1..17: mol_type = other DNA
gcactgcctaggtacac

SEQ ID NO: 2065 - DNA, 17 bp, synthetic construct
  misc_feature 1..17: note = Oligonucleotide
  source 1..17: mol_type = other DNA
tgtgcactgcctaggta

SEQ ID NO: 2066 - DNA, 17 bp, synthetic construct
  misc_feature 1..17: note = Oligonucleotide
  source 1..17: mol_type = other DNA
tgctgtgcactgcctag

SEQ ID NO: 2067 - DNA, 17 bp, synthetic construct
  misc_feature 1..17: note = Oligonucleotide
  source 1..17: mol_type = other DNA
tcgtgctgtgcactgcc

SEQ ID NO: 2068 - DNA, 17 bp, synthetic construct
  misc_feature 1..17: note = Oligonucleotide
  source 1..17: mol_type = other DNA
atttcgtgctgtgcact

SEQ ID NO: 2069 - DNA, 17 bp, synthetic construct
  misc_feature 1..17: note = Oligonucleotide
  source 1..17: mol_type = other DNA
cttatttcgtgctgtgc

SEQ ID NO: 2070 - DNA, 17 bp, synthetic construct
  misc_feature 1..17: note = Oligonucleotide
  source 1..17: mol_type = other DNA
ccacttatttcgtgctg

SEQ ID NO: 2071 - DNA, 17 bp, synthetic construct
  misc_feature 1..17: note = Oligonucleotide
  source 1..17: mol_type = other DNA
gggccacttatttcgtg

SEQ ID NO: 2072 - DNA, 17 bp, synthetic construct
  misc_feature 1..17: note = Oligonucleotide
  source 1..17: mol_type = other DNA
caagggccacttatttc

SEQ ID NO: 2073 - DNA, 17 bp, synthetic construct
  misc_feature 1..17: note = Oligonucleotide
  source 1..17: mol_type = other DNA
ctgcaagggccacttat

SEQ ID NO: 2074 - DNA, 17 bp, synthetic construct
  misc_feature 1..17: note = Oligonucleotide
  source 1..17: mol_type = other DNA
aagctgcaagggccact

SEQ ID NO: 2075 - DNA, 17 bp, synthetic construct
  misc_feature 1..17: note = Oligonucleotide
  source 1..17: mol_type = other DNA
gggaagctgcaagggcc

SEQ ID NO: 2076 - DNA, 17 bp, synthetic construct
  misc_feature 1..17: note = Oligonucleotide
  source 1..17: mol_type = other DNA
acggggaagctgcaagg

SEQ ID NO: 2077 - DNA, 17 bp, synthetic construct
  misc_feature 1..17: note = Oligonucleotide
  source 1..17: mol_type = other DNA
taaacggggaagctgca

SEQ ID NO: 2078 - DNA, 17 bp, synthetic construct
  misc_feature 1..17: note = Oligonucleotide
  source 1..17: mol_type = other DNA
ggttaaacggggaagct

SEQ ID NO: 2079 - DNA, 17 bp, synthetic construct
  misc_feature 1..17: note = Oligonucleotide
  source 1..17: mol_type = other DNA
gtgggttaaacggggaa

SEQ ID NO: 2080 - DNA, 17 bp, synthetic construct
  misc_feature 1..17: note = Oligonucleotide
  source 1..17: mol_type = other DNA
acagtgggttaaacggg

SEQ ID NO: 2081 - DNA, 17 bp, synthetic construct
  misc_feature 1..17: note = Oligonucleotide
  source 1..17: mol_type = other DNA
agcacagtgggttaaac

SEQ ID NO: 2082 - DNA, 17 bp, synthetic construct
  misc_feature 1..17: note = Oligonucleotide
  source 1..17: mol_type = other DNA
tatagcacagtgggtta

SEQ ID NO: 2083 - DNA, 17 bp, synthetic construct
  misc_feature 1..17: note = Oligonucleotide
  source 1..17: mol_type = other DNA
aactatagcacagtggg

SEQ ID NO: 2084 - DNA, 17 bp, synthetic construct
  misc_feature 1..17: note = Oligonucleotide
  source 1..17: mol_type = other DNA
cgcaactatagcacagt

SEQ ID NO: 2085 - DNA, 17 bp, synthetic construct
  misc_feature 1..17: note = Oligonucleotide
  source 1..17: mol_type = other DNA
acccgcaactatagcac

SEQ ID NO: 2086 - DNA, 17 bp, synthetic construct
  misc_feature 1..17: note = Oligonucleotide
  source 1..17: mol_type = other DNA
tccacccgcaactatag

SEQ ID NO: 2087 - DNA, 17 bp, synthetic construct
  misc_feature 1..17: note = Oligonucleotide
  source 1..17: mol_type = other DNA
tgttccacccgcaacta

SEQ ID NO: 2088 - DNA, 17 bp, synthetic construct
  misc_feature 1..17: note = Oligonucleotide
  source 1..17: mol_type = other DNA
gactgttccacccgcaa

SEQ ID NO: 2089 - DNA, 17 bp, synthetic construct
  misc_feature 1..17: note = Oligonucleotide
  source 1..17: mol_type = other DNA
gttgactgttccacccg

SEQ ID NO: 2090 - DNA, 17 bp, synthetic construct
  misc_feature 1..17: note = Oligonucleotide
  source 1..17: mol_type = other DNA
aaggttgactgttccac

SEQ ID NO: 2091 - DNA, 17 bp, synthetic construct
  misc_feature 1..17: note = Oligonucleotide
  source 1..17: mol_type = other DNA
agaaaggttgactgttc

SEQ ID NO: 2092 - DNA, 17 bp, synthetic construct
  misc_feature 1..17: note = Oligonucleotide
  source 1..17: mol_type = other DNA
actagaaaggttgactg

SEQ ID NO: 2093 - DNA, 17 bp, synthetic construct
  misc_feature 1..17: note = Oligonucleotide
  source 1..17: mol_type = other DNA
actactagaaaggttga

SEQ ID NO: 2094 - DNA, 17 bp, synthetic construct
  misc_feature 1..17: note = Oligonucleotide
  source 1..17: mol_type = other DNA
taaactactagaaaggt

SEQ ID NO: 2095 - DNA, 17 bp, synthetic construct
  misc_feature 1..17: note = Oligonucleotide
  source 1..17: mol_type = other DNA
tcataaactactagaaa

SEQ ID NO: 2096 - DNA, 17 bp, synthetic construct
  misc_feature 1..17: note = Oligonucleotide
  source 1..17: mol_type = other DNA
atatcataaactactag

SEQ ID NO: 2097 - DNA, 17 bp, synthetic construct
  misc_feature 1..17: note = Oligonucleotide
  source 1..17: mol_type = other DNA
gcaatatcataaactac

SEQ ID NO: 2098 - DNA, 17 bp, synthetic construct
  misc_feature 1..17: note = Oligonucleotide
  source 1..17: mol_type = other DNA
agggcaatatcataaac

SEQ ID NO: 2099 - DNA, 17 bp, synthetic construct
  misc_feature 1..17: note = Oligonucleotide
  source 1..17: mol_type = other DNA
aagagggcaatatcata

SEQ ID NO: 2100 - DNA, 17 bp, synthetic construct
  misc_feature 1..17: note = Oligonucleotide
  source 1..17: mol_type = other DNA
acaaagagggcaatatc

SEQ ID NO: 2101 - DNA, 17 bp, synthetic construct
  misc_feature 1..17: note = Oligonucleotide
  source 1..17: mol_type = other DNA
aatacaaagagggcaat

SEQ ID NO: 2102 - DNA, 17 bp, synthetic construct
  misc_feature 1..17: note = Oligonucleotide
  source 1..17: mol_type = other DNA
gggaatacaaagagggc

SEQ ID NO: 2103 - DNA, 17 bp, synthetic construct
  misc_feature 1..17: note = Oligonucleotide
  source 1..17: mol_type = other DNA
aatgggaatacaaagag

SEQ ID NO: 2104 - DNA, 17 bp, synthetic construct
  misc_feature 1..17: note = Oligonucleotide
  source 1..17: mol_type = other DNA
gaaaatgggaatacaaa

SEQ ID NO: 2105 - DNA, 17 bp, synthetic construct
  misc_feature 1..17: note = Oligonucleotide
  source 1..17: mol_type = other DNA
gtagaaaatgggaatac

SEQ ID NO: 2106 - DNA, 17 bp, synthetic construct
  misc_feature 1..17: note = Oligonucleotide
  source 1..17: mol_type = other DNA
actgtagaaaatgggaa

SEQ ID NO: 2107 - DNA, 17 bp, synthetic construct
  misc_feature 1..17: note = Oligonucleotide
  source 1..17: mol_type = other DNA
aaaactgtagaaaatgg

SEQ ID NO: 2108 - DNA, 17 bp, synthetic construct
  misc_feature 1..17: note = Oligonucleotide
  source 1..17: mol_type = other DNA
gaaaaaactgtagaaaa

SEQ ID NO: 2109 - DNA, 17 bp, synthetic construct
  misc_feature 1..17: note = Oligonucleotide
  source 1..17: mol_type = other DNA
gcggaaaaaactgtaga

SEQ ID NO: 2110 - DNA, 17 bp, synthetic construct
  misc_feature 1..17: note = Oligonucleotide
  source 1..17: mol_type = other DNA
tctgcggaaaaaactgt

SEQ ID NO: 2111 - DNA, 17 bp, synthetic construct
  misc_feature 1..17: note = Oligonucleotide
  source 1..17: mol_type = other DNA
aagtctgcggaaaaaac

SEQ ID NO: 2112 - DNA, 17 bp, synthetic construct
  misc_feature 1..17: note = Oligonucleotide
  source 1..17: mol_type = other DNA
aagaagtctgcggaaaa

SEQ ID NO: 2113 - DNA, 17 bp, synthetic construct
  misc_feature 1..17: note = Oligonucleotide
  source 1..17: mol_type = other DNA
agaaagaagtctgcgga

SEQ ID NO: 2114 - DNA, 17 bp, synthetic construct
  misc_feature 1..17: note = Oligonucleotide
  source 1..17: mol_type = other DNA
tgcagaaagaagtctgc

SEQ ID NO: 2115 - DNA, 17 bp, synthetic construct
  misc_feature 1..17: note = Oligonucleotide
  source 1..17: mol_type = other DNA
atttgcagaaagaagtc

SEQ ID NO: 2116 - DNA, 17 bp, synthetic construct
  misc_feature 1..17: note = Oligonucleotide
  source 1..17: mol_type = other DNA
ataatttgcagaaagaa

SEQ ID NO: 2117 - DNA, 17 bp, synthetic construct
  misc_feature 1..17: note = Oligonucleotide
  source 1..17: mol_type = other DNA
tgaataatttgcagaaa

SEQ ID NO: 2118 - DNA, 17 bp, synthetic construct
  misc_feature 1..17: note = Oligonucleotide
  source 1..17: mol_type = other DNA
ggctgaataatttgcag

SEQ ID NO: 2119 - DNA, 17 bp, synthetic construct
  misc_feature 1..17: note = Oligonucleotide
  source 1..17: mol_type = other DNA
ggaggctgaataatttg

SEQ ID NO: 2120 - DNA, 17 bp, synthetic construct
  misc_feature 1..17: note = Oligonucleotide
  source 1..17: mol_type = other DNA
tttggaggctgaataat

SEQ ID NO: 2121 - DNA, 17 bp, synthetic construct
  misc_feature 1..17: note = Oligonucleotide
  source 1..17: mol_type = other DNA
gcatttggaggctgaat

SEQ ID NO: 2122 - DNA, 17 bp, synthetic construct
  misc_feature 1..17: note = Oligonucleotide
  source 1..17: mol_type = other DNA
tttgcatttggaggctg

SEQ ID NO: 2123 - DNA, 17 bp, synthetic construct
  misc_feature 1..17: note = Oligonucleotide
  source 1..17: mol_type = other DNA
tcatttgcatttggagg

SEQ ID NO: 2124 - DNA, 17 bp, synthetic construct
  misc_feature 1..17: note = Oligonucleotide
  source 1..17: mol_type = other DNA
cattcatttgcatttgg

SEQ ID NO: 2125 - DNA, 17 bp, synthetic construct
  misc_feature 1..17: note = Oligonucleotide
  source 1..17: mol_type = other DNA
tatcattcatttgcatt

SEQ ID NO: 2126 - DNA, 17 bp, synthetic construct
  misc_feature 1..17: note = Oligonucleotide
  source 1..17: mol_type = other DNA
ttatatcattcatttgc

SEQ ID NO: 2127 - DNA, 17 bp, synthetic construct
  misc_feature 1..17: note = Oligonucleotide
  source 1..17: mol_type = other DNA
tttttatatcattcatt

SEQ ID NO: 2128 - DNA, 17 bp, synthetic construct
  misc_feature 1..17: note = Oligonucleotide
  source 1..17: mol_type = other DNA
ttatttttatatcattc

SEQ ID NO: 2129 - DNA, 17 bp, synthetic construct
  misc_feature 1..17: note = Oligonucleotide
  source 1..17: mol_type = other DNA
tacttatttttatatca

SEQ ID NO: 2130 - DNA, 17 bp, synthetic construct
  misc_feature 1..17: note = Oligonucleotide
  source 1..17: mol_type = other DNA
ccctacttatttttata

SEQ ID NO: 2131 - DNA, 17 bp, synthetic construct
  misc_feature 1..17: note = Oligonucleotide
  source 1..17: mol_type = other DNA
gttccctacttattttt

SEQ ID NO: 2132 - DNA, 17 bp, synthetic construct
  misc_feature 1..17: note = Oligonucleotide
  source 1..17: mol_type = other DNA
catgttccctacttatt

SEQ ID NO: 2133 - DNA, 17 bp, synthetic construct
  misc_feature 1..17: note = Oligonucleotide
  source 1..17: mol_type = other DNA
tgccatgttccctactt

SEQ ID NO: 2134 - DNA, 17 bp, synthetic construct
  misc_feature 1..17: note = Oligonucleotide
  source 1..17: mol_type = other DNA
ctctgccatgttcccta

SEQ ID NO: 2135 - DNA, 17 bp, synthetic construct
  misc_feature 1..17: note = Oligonucleotide
  source 1..17: mol_type = other DNA
actctctgccatgttcc

SEQ ID NO: 2136 - DNA, 17 bp, synthetic construct
  misc_feature 1..17: note = Oligonucleotide
  source 1..17: mol_type = other DNA
accactctctgccatgt

SEQ ID NO: 2137 - DNA, 17 bp, synthetic construct
  misc_feature 1..17: note = Oligonucleotide
  source 1..17: mol_type = other DNA
agcaccactctctgcca

SEQ ID NO: 2138 - DNA, 17 bp, synthetic construct
  misc_feature 1..17: note = Oligonucleotide
  source 1..17: mol_type = other DNA
ggaagcaccactctctg

SEQ ID NO: 2139 - DNA, 17 bp, synthetic construct
  misc_feature 1..17: note = Oligonucleotide
  source 1..17: mol_type = other DNA
ctgggaagcaccactct

SEQ ID NO: 2140 - DNA, 17 bp, synthetic construct
  misc_feature 1..17: note = Oligonucleotide
  source 1..17: mol_type = other DNA
aggctgggaagcaccac

SEQ ID NO: 2141 - DNA, 17 bp, synthetic construct
  misc_feature 1..17: note = Oligonucleotide
  source 1..17: mol_type = other DNA
gtgaggctgggaagcac

SEQ ID NO: 2142 - DNA, 17 bp, synthetic construct
  misc_feature 1..17: note = Oligonucleotide
  source 1..17: mol_type = other DNA
attgtgaggctgggaag

SEQ ID NO: 2143 - DNA, 17 bp, synthetic construct
  misc_feature 1..17: note = Oligonucleotide
  source 1..17: mol_type = other DNA
cacattgtgaggctggg

SEQ ID NO: 2144 - DNA, 17 bp, synthetic construct
  misc_feature 1..17: note = Oligonucleotide
  source 1..17: mol_type = other DNA
tcccacattgtgaggct

SEQ ID NO: 2145 - DNA, 17 bp, synthetic construct
  misc_feature 1..17: note = Oligonucleotide
  source 1..17: mol_type = other DNA
aattcccacattgtgag

SEQ ID NO: 2146 - DNA, 17 bp, synthetic construct
  misc_feature 1..17: note = Oligonucleotide
  source 1..17: mol_type = other DNA
tcaaattcccacattgt

SEQ ID NO: 2147 - DNA, 17 bp, synthetic construct
  misc_feature 1..17: note = Oligonucleotide
  source 1..17: mol_type = other DNA
atgtcaaattcccacat

SEQ ID NO: 2148 - DNA, 17 bp, synthetic construct
  misc_feature 1..17: note = Oligonucleotide
  source 1..17: mol_type = other DNA
cctatgtcaaattccca

SEQ ID NO: 2149 - DNA, 17 bp, synthetic construct
  misc_feature 1..17: note = Oligonucleotide
  source 1..17: mol_type = other DNA
catcctatgtcaaattc

SEQ ID NO: 2150 - DNA, 17 bp, synthetic construct
  misc_feature 1..17: note = Oligonucleotide
  source 1..17: mol_type = other DNA
tctcatcctatgtcaaa

SEQ ID NO: 2151 - DNA, 17 bp, synthetic construct
  misc_feature 1..17: note = Oligonucleotide
  source 1..17: mol_type = other DNA
gactctcatcctatgtc

SEQ ID NO: 2152 - DNA, 17 bp, synthetic construct
  misc_feature 1..17: note = Oligonucleotide
  source 1..17: mol_type = other DNA
tctgactctcatcctat

SEQ ID NO: 2153 - DNA, 17 bp, synthetic construct
  misc_feature 1..17: note = Oligonucleotide
  source 1..17: mol_type = other DNA
tactctgactctcatcc

SEQ ID NO: 2154 - DNA, 17 bp, synthetic construct
  misc_feature 1..17: note = Oligonucleotide
  source 1..17: mol_type = other DNA
ctatactctgactctca

SEQ ID NO: 2155 - DNA, 17 bp, synthetic construct
  misc_feature 1..17: note = Oligonucleotide
  source 1..17: mol_type = other DNA
aacctatactctgactc

SEQ ID NO: 2156 - DNA, 17 bp, synthetic construct
  misc_feature 1..17: note = Oligonucleotide
  source 1..17: mol_type = other DNA
ttaaacctatactctga

SEQ ID NO: 2157 - DNA, 17 bp, synthetic construct
  misc_feature 1..17: note = Oligonucleotide
  source 1..17: mol_type = other DNA
cttttaaacctatactc

SEQ ID NO: 2158 - DNA, 17 bp, synthetic construct
  misc_feature 1..17: note = Oligonucleotide
  source 1..17: mol_type = other DNA
tatcttttaaacctata

SEQ ID NO: 2159 - DNA, 17 bp, synthetic construct
  misc_feature 1..17: note = Oligonucleotide
  source 1..17: mol_type = other DNA
ttttatcttttaaacct

SEQ ID NO: 2160 - DNA, 17 bp, synthetic construct
  misc_feature 1..17: note = Oligonucleotide
  source 1..17: mol_type = other DNA
agattttatcttttaaa

SEQ ID NO: 2161 - DNA, 17 bp, synthetic construct
  misc_feature 1..17: note = Oligonucleotide
  source 1..17: mol_type = other DNA
taaagattttatctttt

SEQ ID NO: 2162 - DNA, 17 bp, synthetic construct
  misc_feature 1..17: note = Oligonucleotide
  source 1..17: mol_type = other DNA
aactaaagattttatct

SEQ ID NO: 2163 - DNA, 17 bp, synthetic construct
  misc_feature 1..17: note = Oligonucleotide
  source 1..17: mol_type = other DNA
attaactaaagatttta

SEQ ID NO: 2164 - DNA, 17 bp, synthetic construct
  misc_feature 1..17: note = Oligonucleotide
  source 1..17: mol_type = other DNA
attattaactaaagatt

SEQ ID NO: 2165 - DNA, 17 bp, synthetic construct
  misc_feature 1..17: note = Oligonucleotide
  source 1..17: mol_type = other DNA
aaaattattaactaaag

SEQ ID NO: 2166 - DNA, 17 bp, synthetic construct
  misc_feature 1..17: note = Oligonucleotide
  source 1..17: mol_type = other DNA
tacaaaattattaacta

SEQ ID NO: 2167 - DNA, 17 bp, synthetic construct
  misc_feature 1..17: note = Oligonucleotide
  source 1..17: mol_type = other DNA
aaatacaaaattattaa

SEQ ID NO: 2168 - DNA, 17 bp, synthetic construct
  misc_feature 1..17: note = Oligonucleotide
  source 1..17: mol_type = other DNA
aataaatacaaaattat

SEQ ID NO: 2169 - DNA, 17 bp, synthetic construct
  misc_feature 1..17: note = Oligonucleotide
  source 1..17: mol_type = other DNA
ataaataaatacaaaat

SEQ ID NO: 2170 - DNA, 17 bp, synthetic construct
  misc_feature 1..17: note = Oligonucleotide
  source 1..17: mol_type = other DNA
agaataaataaatacaa

SEQ ID NO: 2171 - DNA, 17 bp, synthetic construct
  misc_feature 1..17: note = Oligonucleotide
  source 1..17: mol_type = other DNA
tctagaataaataaata

SEQ ID NO: 2172 - DNA, 17 bp, synthetic construct
  misc_feature 1..17: note = Oligonucleotide
  source 1..17: mol_type = other DNA
acatctagaataaataa

SEQ ID NO: 2173 - DNA, 17 bp, synthetic construct
  misc_feature 1..17: note = Oligonucleotide
  source 1..17: mol_type = other DNA
catacatctagaataaa

SEQ ID NO: 2174 - DNA, 17 bp, synthetic construct
  misc_feature 1..17: note = Oligonucleotide
  source 1..17: mol_type = other DNA
atacatacatctagaat

SEQ ID NO: 2175 - DNA, 17 bp, synthetic construct
  misc_feature 1..17: note = Oligonucleotide
  source 1..17: mol_type = other DNA
cagatacatacatctag

SEQ ID NO: 2176 - DNA, 17 bp, synthetic construct
  misc_feature 1..17: note = Oligonucleotide
  source 1..17: mol_type = other DNA
cctcagatacatacatc

SEQ ID NO: 2177 - DNA, 17 bp, synthetic construct
  misc_feature 1..17: note = Oligonucleotide
  source 1..17: mol_type = other DNA
tttcctcagatacatac

SEQ ID NO: 2178 - DNA, 17 bp, synthetic construct
  misc_feature 1..17: note = Oligonucleotide
  source 1..17: mol_type = other DNA
ttctttcctcagataca

SEQ ID NO: 2179 - DNA, 17 bp, synthetic construct
  misc_feature 1..17: note = Oligonucleotide
  source 1..17: mol_type = other DNA
gatttctttcctcagat

SEQ ID NO: 2180 - DNA, 17 bp, synthetic construct
  misc_feature 1..17: note = Oligonucleotide
  source 1..17: mol_type = other DNA
ccagatttctttcctca

SEQ ID NO: 2181 - DNA, 17 bp, synthetic construct
  misc_feature 1..17: note = Oligonucleotide
  source 1..17: mol_type = other DNA
ataccagatttctttcc

SEQ ID NO: 2182 - DNA, 17 bp, synthetic construct
  misc_feature 1..17: note = Oligonucleotide
  source 1..17: mol_type = other DNA
aaaataccagatttctt

SEQ ID NO: 2183 - DNA, 17 bp, synthetic construct
  misc_feature 1..17: note = Oligonucleotide
  source 1..17: mol_type = other DNA
gcaaaaataccagattt

SEQ ID NO: 2184 - DNA, 17 bp, synthetic construct
  misc_feature 1..17: note = Oligonucleotide
  source 1..17: mol_type = other DNA
aaagcaaaaataccaga

SEQ ID NO: 2185 - DNA, 17 bp, synthetic construct
  misc_feature 1..17: note = Oligonucleotide
  source 1..17: mol_type = other DNA
tggaaagcaaaaatacc

SEQ ID NO: 2186 - DNA, 17 bp, synthetic construct
  misc_feature 1..17: note = Oligonucleotide
  source 1..17: mol_type = other DNA
tattggaaagcaaaaat

SEQ ID NO: 2187 - DNA, 17 bp, synthetic construct
  misc_feature 1..17: note = Oligonucleotide
  source 1..17: mol_type = other DNA
ctttattggaaagcaaa

SEQ ID NO: 2188 - DNA, 17 bp, synthetic construct
  misc_feature 1..17: note = Oligonucleotide
  source 1..17: mol_type = other DNA
cccctttattggaaagc

SEQ ID NO: 2189 - DNA, 17 bp, synthetic construct
  misc_feature 1..17: note = Oligonucleotide
  source 1..17: mol_type = other DNA
gatcccctttattggaa

SEQ ID NO: 2190 - DNA, 17 bp, synthetic construct
  misc_feature 1..17: note = Oligonucleotide
  source 1..17: mol_type = other DNA
tttgatcccctttattg

SEQ ID NO: 2191 - DNA, 17 bp, synthetic construct
  misc_feature 1..17: note = Oligonucleotide
  source 1..17: mol_type = other DNA
tactttgatccccttta

SEQ ID NO: 2192 - DNA, 17 bp, synthetic construct
  misc_feature 1..17: note = Oligonucleotide
  source 1..17: mol_type = other DNA
cattactttgatcccct

SEQ ID NO: 2193 - DNA, 17 bp, synthetic construct
  misc_feature 1..17: note = Oligonucleotide
  source 1..17: mol_type = other DNA
aaccattactttgatcc

SEQ ID NO: 2194 - DNA, 17 bp, synthetic construct
  misc_feature 1..17: note = Oligonucleotide
  source 1..17: mol_type = other DNA
aaaaaccattactttga

SEQ ID NO: 2195 - DNA, 17 bp, synthetic construct
  misc_feature 1..17: note = Oligonucleotide
  source 1..17: mol_type = other DNA
gagaaaaaccattactt

SEQ ID NO: 2196 - DNA, 17 bp, synthetic construct
  misc_feature 1..17: note = Oligonucleotide
  source 1..17: mol_type = other DNA
tgagagaaaaaccatta

SEQ ID NO: 2197 - DNA, 17 bp, synthetic construct
  misc_feature 1..17: note = Oligonucleotide
  source 1..17: mol_type = other DNA
aactgagagaaaaacca

SEQ ID NO: 2198 - DNA, 17 bp, synthetic construct
  misc_feature 1..17: note = Oligonucleotide
  source 1..17: mol_type = other DNA
gagaactgagagaaaaa

SEQ ID NO: 2199 - DNA, 17 bp, synthetic construct
  misc_feature 1..17: note = Oligonucleotide
  source 1..17: mol_type = other DNA
ttagagaactgagagaa

SEQ ID NO: 2200 - DNA, 17 bp, synthetic construct
  misc_feature 1..17: note = Oligonucleotide
  source 1..17: mol_type = other DNA
agcttagagaactgaga

SEQ ID NO: 2201 - DNA, 17 bp, synthetic construct
  misc_feature 1..17: note = Oligonucleotide
  source 1..17: mol_type = other DNA
accagcttagagaactg

SEQ ID NO: 2202 - DNA, 17 bp, synthetic construct
  misc_feature 1..17: note = Oligonucleotide
  source 1..17: mol_type = other DNA
tagaccagcttagagaa

SEQ ID NO: 2203 - DNA, 17 bp, synthetic construct
  misc_feature 1..17: note = Oligonucleotide
  source 1..17: mol_type = other DNA
acatagaccagcttaga

SEQ ID NO: 2204 - DNA, 17 bp, synthetic construct
  misc_feature 1..17: note = Oligonucleotide
  source 1..17: mol_type = other DNA
ataacatagaccagctt

SEQ ID NO: 2205 - DNA, 17 bp, synthetic construct
  misc_feature 1..17: note = Oligonucleotide
  source 1..17: mol_type = other DNA
gctataacatagaccag

SEQ ID NO: 2206 - DNA, 17 bp, synthetic construct
  misc_feature 1..17: note = Oligonucleotide
  source 1..17: mol_type = other DNA
agagctataacatagac

SEQ ID NO: 2207 - DNA, 17 bp, synthetic construct
  misc_feature 1..17: note = Oligonucleotide
  source 1..17: mol_type = other DNA
gctagagctataacata

SEQ ID NO: 2208 - DNA, 17 bp, synthetic construct
  misc_feature 1..17: note = Oligonucleotide
  source 1..17: mol_type = other DNA
actgctagagctataac

SEQ ID NO: 2209 - DNA, 17 bp, synthetic construct
  misc_feature 1..17: note = Oligonucleotide
  source 1..17: mol_type = other DNA
catactgctagagctat

SEQ ID NO: 2210 - DNA, 17 bp, synthetic construct
  misc_feature 1..17: note = Oligonucleotide
  source 1..17: mol_type = other DNA
ttccatactgctagagc

SEQ ID NO: 2211 - DNA, 17 bp, synthetic construct
  misc_feature 1..17: note = Oligonucleotide
  source 1..17: mol_type = other DNA
catttccatactgctag

SEQ ID NO: 2212 - DNA, 17 bp, synthetic construct
  misc_feature 1..17: note = Oligonucleotide
  source 1..17: mol_type = other DNA
gcacatttccatactgc

SEQ ID NO: 2213 - DNA, 17 bp, synthetic construct
  misc_feature 1..17: note = Oligonucleotide
  source 1..17: mol_type = other DNA
aaagcacatttccatac

SEQ ID NO: 2214 - DNA, 17 bp, synthetic construct
  misc_feature 1..17: note = Oligonucleotide
  source 1..17: mol_type = other DNA
tttaaagcacatttcca

SEQ ID NO: 2215 - DNA, 17 bp, synthetic construct
  misc_feature 1..17: note = Oligonucleotide
  source 1..17: mol_type = other DNA
tattttaaagcacattt

SEQ ID NO: 2216 - DNA, 17 bp, synthetic construct
  misc_feature 1..17: note = Oligonucleotide
  source 1..17: mol_type = other DNA
gcatattttaaagcaca

SEQ ID NO: 2217 - DNA, 17 bp, synthetic construct
  misc_feature 1..17: note = Oligonucleotide
  source 1..17: mol_type = other DNA
taagcatattttaaagc

SEQ ID NO: 2218 - DNA, 17 bp, synthetic construct
  misc_feature 1..17: note = Oligonucleotide
  source 1..17: mol_type = other DNA
aggtaagcatattttaa

SEQ ID NO: 2219 - DNA, 17 bp, synthetic construct
  misc_feature 1..17: note = Oligonucleotide
  source 1..17: mol_type = other DNA
aaaaggtaagcatattt

SEQ ID NO: 2220 - DNA, 17 bp, synthetic construct
  misc_feature 1..17: note = Oligonucleotide
  source 1..17: mol_type = other DNA
ttcaaaaggtaagcata

SEQ ID NO: 2221 - DNA, 17 bp, synthetic construct
  misc_feature 1..17: note = Oligonucleotide
  source 1..17: mol_type = other DNA
tcattcaaaaggtaagc

SEQ ID NO: 2222 - DNA, 17 bp, synthetic construct
  misc_feature 1..17: note = Oligonucleotide
  source 1..17: mol_type = other DNA
tgatcattcaaaaggta

SEQ ID NO: 2223 - DNA, 17 bp, synthetic construct
  misc_feature 1..17: note = Oligonucleotide
  source 1..17: mol_type = other DNA
ccatgatcattcaaaag

SEQ ID NO: 2224 - DNA, 17 bp, synthetic construct
  misc_feature 1..17: note = Oligonucleotide
  source 1..17: mol_type = other DNA
tagccatgatcattcaa

SEQ ID NO: 2225 - DNA, 17 bp, synthetic construct
  misc_feature 1..17: note = Oligonucleotide
  source 1..17: mol_type = other DNA
atatagccatgatcatt

SEQ ID NO: 2226 - DNA, 17 bp, synthetic construct
  misc_feature 1..17: note = Oligonucleotide
  source 1..17: mol_type = other DNA
aacatatagccatgatc

SEQ ID NO: 2227 - DNA, 17 bp, synthetic construct
  misc_feature 1..17: note = Oligonucleotide
  source 1..17: mol_type = other DNA
aacaacatatagccatg

SEQ ID NO: 2228 - DNA, 17 bp, synthetic construct
  misc_feature 1..17: note = Oligonucleotide
  source 1..17: mol_type = other DNA
ctcaacaacatatagcc

SEQ ID NO: 2229 - DNA, 17 bp, synthetic construct
  misc_feature 1..17: note = Oligonucleotide
  source 1..17: mol_type = other DNA
tatctcaacaacatata

SEQ ID NO: 2230 - DNA, 17 bp, synthetic construct
  misc_feature 1..17: note = Oligonucleotide
  source 1..17: mol_type = other DNA
aaatatctcaacaacat

SEQ ID NO: 2231 - DNA, 17 bp, synthetic construct
  misc_feature 1..17: note = Oligonucleotide
  source 1..17: mol_type = other DNA
ttcaaatatctcaacaa

SEQ ID NO: 2232 - DNA, 17 bp, synthetic construct
  misc_feature 1..17: note = Oligonucleotide
  source 1..17: mol_type = other DNA
agtttcaaatatctcaa

SEQ ID NO: 2233 - DNA, 17 bp, synthetic construct
  misc_feature 1..17: note = Oligonucleotide
  source 1..17: mol_type = other DNA
gtaagtttcaaatatct

SEQ ID NO: 2234 - DNA, 17 bp, synthetic construct
  misc_feature 1..17: note = Oligonucleotide
  source 1..17: mol_type = other DNA
aaggtaagtttcaaata

SEQ ID NO: 2235 - DNA, 17 bp, synthetic construct
  misc_feature 1..17: note = Oligonucleotide
  source 1..17: mol_type = other DNA
aacaaggtaagtttcaa

SEQ ID NO: 2236 - DNA, 17 bp, synthetic construct
  misc_feature 1..17: note = Oligonucleotide
  source 1..17: mol_type = other DNA
gaaaacaaggtaagttt

SEQ ID NO: 2237 - DNA, 17 bp, synthetic construct
  misc_feature 1..17: note = Oligonucleotide
  source 1..17: mol_type = other DNA
agtgaaaacaaggtaag

SEQ ID NO: 2238 - DNA, 17 bp, synthetic construct
  misc_feature 1..17: note = Oligonucleotide
  source 1..17: mol_type = other DNA
acaagtgaaaacaaggt

SEQ ID NO: 2239 - DNA, 17 bp, synthetic construct
  misc_feature 1..17: note = Oligonucleotide
  source 1..17: mol_type = other DNA
tgcacaagtgaaaacaa

SEQ ID NO: 2240 - DNA, 17 bp, synthetic construct
  misc_feature 1..17: note = Oligonucleotide
  source 1..17: mol_type = other DNA
cagtgcacaagtgaaaa

SEQ ID NO: 2241 - DNA, 17 bp, synthetic construct
  misc_feature 1..17: note = Oligonucleotide
  source 1..17: mol_type = other DNA
tcacagtgcacaagtga

SEQ ID NO: 2242 - DNA, 17 bp, synthetic construct
  misc_feature 1..17: note = Oligonucleotide
  source 1..17: mol_type = other DNA
cattcacagtgcacaag

SEQ ID NO: 2243 - DNA, 17 bp, synthetic construct
  misc_feature 1..17: note = Oligonucleotide
  source 1..17: mol_type = other DNA
gttcattcacagtgcac

SEQ ID NO: 2244 - DNA, 17 bp, synthetic construct
  misc_feature 1..17: note = Oligonucleotide
  source 1..17: mol_type = other DNA
aaagttcattcacagtg

SEQ ID NO: 2245 - DNA, 17 bp, synthetic construct
  misc_feature 1..17: note = Oligonucleotide
  source 1..17: mol_type = other DNA
tacaaagttcattcaca

SEQ ID NO: 2246 - DNA, 17 bp, synthetic construct
  misc_feature 1..17: note = Oligonucleotide
  source 1..17: mol_type = other DNA
taatacaaagttcattc

SEQ ID NO: 2247 - DNA, 17 bp, synthetic construct
  misc_feature 1..17: note = Oligonucleotide
  source 1..17: mol_type = other DNA
aaataatacaaagttca

SEQ ID NO: 2248 - DNA, 17 bp, synthetic construct
  misc_feature 1..17: note = Oligonucleotide
  source 1..17: mol_type = other DNA
aaaaaataatacaaagt

SEQ ID NO: 2249 - DNA, 17 bp, synthetic construct
  misc_feature 1..17: note = Oligonucleotide
  source 1..17: mol_type = other DNA
ttaaaaaaataatacaa

SEQ ID NO: 2250 - DNA, 17 bp, synthetic construct
  misc_feature 1..17: note = Oligonucleotide
  source 1..17: mol_type = other DNA
gttttaaaaaaataata

SEQ ID NO: 2251 - DNA, 17 bp, synthetic construct
  misc_feature 1..17: note = Oligonucleotide
  source 1..17: mol_type = other DNA
aaggttttaaaaaaata

SEQ ID NO: 2252 - DNA, 17 bp, synthetic construct
  misc_feature 1..17: note = Oligonucleotide
  source 1..17: mol_type = other DNA
gtgaaggttttaaaaaa

SEQ ID NO: 2253 - DNA, 17 bp, synthetic construct
  misc_feature 1..17: note = Oligonucleotide
  source 1..17: mol_type = other DNA
aatgtgaaggttttaaa

SEQ ID NO: 2254 - DNA, 17 bp, synthetic construct
  misc_feature 1..17: note = Oligonucleotide
  source 1..17: mol_type = other DNA
cgtaatgtgaaggtttt

SEQ ID NO: 2255 - DNA, 17 bp, synthetic construct
  misc_feature 1..17: note = Oligonucleotide
  source 1..17: mol_type = other DNA
acacgtaatgtgaaggt

SEQ ID NO: 2256 - DNA, 17 bp, synthetic construct
  misc_feature 1..17: note = Oligonucleotide
  source 1..17: mol_type = other DNA
tctacacgtaatgtgaa

SEQ ID NO: 2257 - DNA, 17 bp, synthetic construct
  misc_feature 1..17: note = Oligonucleotide
  source 1..17: mol_type = other DNA
atatctacacgtaatgt

SEQ ID NO: 2258 - DNA, 17 bp, synthetic construct
  misc_feature 1..17: note = Oligonucleotide
  source 1..17: mol_type = other DNA
ataatatctacacgtaa

SEQ ID NO: 2259 - DNA, 17 bp, synthetic construct
  misc_feature 1..17: note = Oligonucleotide
  source 1..17: mol_type = other DNA
gcaataatatctacacg

SEQ ID NO: 2260 - DNA, 17 bp, synthetic construct
  misc_feature 1..17: note = Oligonucleotide
  source 1..17: mol_type = other DNA
gttgcaataatatctac

SEQ ID NO: 2261 - DNA, 17 bp, synthetic construct
  misc_feature 1..17: note = Oligonucleotide
  source 1..17: mol_type = other DNA
taagttgcaataatatc

SEQ ID NO: 2262 - DNA, 17 bp, synthetic construct
  misc_feature 1..17: note = Oligonucleotide
  source 1..17: mol_type = other DNA
atataagttgcaataat

SEQ ID NO: 2263 - DNA, 17 bp, synthetic construct
  misc_feature 1..17: note = Oligonucleotide
  source 1..17: mol_type = other DNA
aaaatataagttgcaat

SEQ ID NO: 2264 - DNA, 17 bp, synthetic construct
  misc_feature 1..17: note = Oligonucleotide
  source 1..17: mol_type = other DNA
ggcaaaatataagttgc

SEQ ID NO: 2265 - DNA, 17 bp, synthetic construct
  misc_feature 1..17: note = Oligonucleotide
  source 1..17: mol_type = other DNA
tcaggcaaaatataagt

SEQ ID NO: 2266 - DNA, 17 bp, synthetic construct
  misc_feature 1..17: note = Oligonucleotide
  source 1..17: mol_type = other DNA
agctcaggcaaaatata

SEQ ID NO: 2267 - DNA, 17 bp, synthetic construct
  misc_feature 1..17: note = Oligonucleotide
  source 1..17: mol_type = other DNA
tcaagctcaggcaaaat

SEQ ID NO: 2268 - DNA, 17 bp, synthetic construct
  misc_feature 1..17: note = Oligonucleotide
  source 1..17: mol_type = other DNA
tgatcaagctcaggcaa

SEQ ID NO: 2269 - DNA, 17 bp, synthetic construct
  misc_feature 1..17: note = Oligonucleotide
  source 1..17: mol_type = other DNA
ctttgatcaagctcagg

SEQ ID NO: 2270 - DNA, 17 bp, synthetic construct
  misc_feature 1..17: note = Oligonucleotide
  source 1..17: mol_type = other DNA
gacctttgatcaagctc

SEQ ID NO: 2271 - DNA, 17 bp, synthetic construct
  misc_feature 1..17: note = Oligonucleotide
  source 1..17: mol_type = other DNA
aatgacctttgatcaag

SEQ ID NO: 2272 - DNA, 17 bp, synthetic construct
  misc_feature 1..17: note = Oligonucleotide
  source 1..17: mol_type = other DNA
acaaatgacctttgatc

SEQ ID NO: 2273 - DNA, 17 bp, synthetic construct
  misc_feature 1..17: note = Oligonucleotide
  source 1..17: mol_type = other DNA
tacacaaatgacctttg

SEQ ID NO: 2274 - DNA, 17 bp, synthetic construct
  misc_feature 1..17: note = Oligonucleotide
  source 1..17: mol_type = other DNA
atctacacaaatgacct

SEQ ID NO: 2275 - DNA, 17 bp, synthetic construct
  misc_feature 1..17: note = Oligonucleotide
  source 1..17: mol_type = other DNA
ctcatctacacaaatga

SEQ ID NO: 2276 - DNA, 17 bp, synthetic construct
  misc_feature 1..17: note = Oligonucleotide
  source 1..17: mol_type = other DNA
ttactcatctacacaaa

SEQ ID NO: 2277 - DNA, 17 bp, synthetic construct
  misc_feature 1..17: note = Oligonucleotide
  source 1..17: mol_type = other DNA
taattactcatctacac

SEQ ID NO: 2278 - DNA, 17 bp, synthetic construct
  misc_feature 1..17: note = Oligonucleotide
  source 1..17: mol_type = other DNA
ttttaattactcatcta

SEQ ID NO: 2279 - DNA, 17 bp, synthetic construct
  misc_feature 1..17: note = Oligonucleotide
  source 1..17: mol_type = other DNA
attttttaattactcat

SEQ ID NO: 2280 - DNA, 17 bp, synthetic construct
  misc_feature 1..17: note = Oligonucleotide
  source 1..17: mol_type = other DNA
aatattttttaattact

SEQ ID NO: 2281 - DNA, 17 bp, synthetic construct
  misc_feature 1..17: note = Oligonucleotide
  source 1..17: mol_type = other DNA
ttaaatattttttaatt

SEQ ID NO: 2282 - DNA, 17 bp, synthetic construct
  misc_feature 1..17: note = Oligonucleotide
  source 1..17: mol_type = other DNA
gatttaaatatttttta

SEQ ID NO: 2283 - DNA, 17 bp, synthetic construct
  misc_feature 1..17: note = Oligonucleotide
  source 1..17: mol_type = other DNA
tgtgatttaaatatttt

SEQ ID NO: 2284 - DNA, 17 bp, synthetic construct
  misc_feature 1..17: note = Oligonucleotide
  source 1..17: mol_type = other DNA
taatgtgatttaaatat

SEQ ID NO: 2285 - DNA, 17 bp, synthetic construct
  misc_feature 1..17: note = Oligonucleotide
  source 1..17: mol_type = other DNA
ttataatgtgatttaaa

SEQ ID NO: 2286 - DNA, 17 bp, synthetic construct
  misc_feature 1..17: note = Oligonucleotide
  source 1..17: mol_type = other DNA
gaattataatgtgattt

SEQ ID NO: 2287 - DNA, 17 bp, synthetic construct
  misc_feature 1..17: note = Oligonucleotide
  source 1..17: mol_type = other DNA
atagaattataatgtga

SEQ ID NO: 2288 - DNA, 17 bp, synthetic construct
  misc_feature 1..17: note = Oligonucleotide
  source 1..17: mol_type = other DNA
ataatagaattataatg

SEQ ID NO: 2289 - DNA, 17 bp, synthetic construct
  misc_feature 1..17: note = Oligonucleotide
  source 1..17: mol_type = other DNA
ccaataatagaattata

SEQ ID NO: 2290 - DNA, 17 bp, synthetic construct
  misc_feature 1..17: note = Oligonucleotide
  source 1..17: mol_type = other DNA
tctccaataatagaatt

SEQ ID NO: 2291 - DNA, 17 bp, synthetic construct
  misc_feature 1..17: note = Oligonucleotide
  source 1..17: mol_type = other DNA
tgctctccaataataga

SEQ ID NO: 2292 - DNA, 17 bp, synthetic construct
  misc_feature 1..17: note = Oligonucleotide
  source 1..17: mol_type = other DNA
agatgctctccaataat

SEQ ID NO: 2293 - DNA, 17 bp, synthetic construct
  misc_feature 1..17: note = Oligonucleotide
  source 1..17: mol_type = other DNA
aaaagatgctctccaat

SEQ ID NO: 2294 - DNA, 17 bp, synthetic construct
  misc_feature 1..17: note = Oligonucleotide
  source 1..17: mol_type = other DNA
tttaaaagatgctctcc

SEQ ID NO: 2295 - DNA, 17 bp, synthetic construct
  misc_feature 1..17: note = Oligonucleotide
  source 1..17: mol_type = other DNA
aaatttaaaagatgctc

SEQ ID NO: 2296 - DNA, 17 bp, synthetic construct
  misc_feature 1..17: note = Oligonucleotide
  source 1..17: mol_type = other DNA
aaaaaatttaaaagatg

SEQ ID NO: 2297 - DNA, 17 bp, synthetic construct
  misc_feature 1..17: note = Oligonucleotide
  source 1..17: mol_type = other DNA
agaaaaaaatttaaaag

SEQ ID NO: 2298 - DNA, 17 bp, synthetic construct
  misc_feature 1..17: note = Oligonucleotide
  source 1..17: mol_type = other DNA
aacagaaaaaaatttaa

SEQ ID NO: 2299 - DNA, 17 bp, synthetic construct
  misc_feature 1..17: note = Oligonucleotide
  source 1..17: mol_type = other DNA
taaaacagaaaaaaatt

SEQ ID NO: 2300 - DNA, 17 bp, synthetic construct
  misc_feature 1..17: note = Oligonucleotide
  source 1..17: mol_type = other DNA
cgttaaaacagaaaaaa

SEQ ID NO: 2301 - DNA, 17 bp, synthetic construct
  misc_feature 1..17: note = Oligonucleotide
  source 1..17: mol_type = other DNA
cctcgttaaaacagaaa

SEQ ID NO: 2302 - DNA, 17 bp, synthetic construct
  misc_feature 1..17: note = Oligonucleotide
  source 1..17: mol_type = other DNA
ttccctcgttaaaacag

SEQ ID NO: 2303 - DNA, 17 bp, synthetic construct
  misc_feature 1..17: note = Oligonucleotide
  source 1..17: mol_type = other DNA
tctttccctcgttaaaa

SEQ ID NO: 2304 - DNA, 17 bp, synthetic construct
  misc_feature 1..17: note = Oligonucleotide
  source 1..17: mol_type = other DNA
ttctctttccctcgtta

SEQ ID NO: 2305 - DNA, 17 bp, synthetic construct
  misc_feature 1..17: note = Oligonucleotide
  source 1..17: mol_type = other DNA
ggtttctctttccctcg

SEQ ID NO: 2306 - DNA, 17 bp, synthetic construct
  misc_feature 1..17: note = Oligonucleotide
  source 1..17: mol_type = other DNA
acaggtttctctttccc

SEQ ID NO: 2307 - DNA, 17 bp, synthetic construct
  misc_feature 1..17: note = Oligonucleotide
  source 1..17: mol_type = other DNA
tatacaggtttctcttt

SEQ ID NO: 2308 - DNA, 17 bp, synthetic construct
  misc_feature 1..17: note = Oligonucleotide
  source 1..17: mol_type = other DNA
aggtatacaggtttctc

SEQ ID NO: 2309 - DNA, 17 bp, synthetic construct
  misc_feature 1..17: note = Oligonucleotide
  source 1..17: mol_type = other DNA
cctaggtatacaggttt

SEQ ID NO: 2310 - DNA, 17 bp, synthetic construct
  misc_feature 1..17: note = Oligonucleotide
  source 1..17: mol_type = other DNA
gaccctaggtatacagg

SEQ ID NO: 2311 - DNA, 17 bp, synthetic construct
  misc_feature 1..17: note = Oligonucleotide
  source 1..17: mol_type = other DNA
aatgaccctaggtatac

SEQ ID NO: 2312 - DNA, 17 bp, synthetic construct
  misc_feature 1..17: note = Oligonucleotide
  source 1..17: mol_type = other DNA
aataatgaccctaggta

SEQ ID NO: 2313 - DNA, 17 bp, synthetic construct
  misc_feature 1..17: note = Oligonucleotide
  source 1..17: mol_type = other DNA
tcaaataatgaccctag

SEQ ID NO: 2314 - DNA, 17 bp, synthetic construct
  misc_feature 1..17: note = Oligonucleotide
  source 1..17: mol_type = other DNA
gggtcaaataatgaccc

SEQ ID NO: 2315 - DNA, 17 bp, synthetic construct
  misc_feature 1..17: note = Oligonucleotide
  source 1..17: mol_type = other DNA
atggggtcaaataatga

SEQ ID NO: 2316 - DNA, 17 bp, synthetic construct
  misc_feature 1..17: note = Oligonucleotide
  source 1..17: mol_type = other DNA
actatggggtcaaataa

SEQ ID NO: 2317 - DNA, 17 bp, synthetic construct
  misc_feature 1..17: note = Oligonucleotide
  source 1..17: mol_type = other DNA
tatactatggggtcaaa

SEQ ID NO: 2318 - DNA, 17 bp, synthetic construct
  misc_feature 1..17: note = Oligonucleotide
  source 1..17: mol_type = other DNA
ggttatactatggggtc

SEQ ID NO: 2319 - DNA, 17 bp, synthetic construct
  misc_feature 1..17: note = Oligonucleotide
  source 1..17: mol_type = other DNA
tctggttatactatggg

SEQ ID NO: 2320 - DNA, 17 bp, synthetic construct
  misc_feature 1..17: note = Oligonucleotide
  source 1..17: mol_type = other DNA
gaatctggttatactat

SEQ ID NO: 2321 - DNA, 17 bp, synthetic construct
  misc_feature 1..17: note = Oligonucleotide
  source 1..17: mol_type = other DNA
catgaatctggttatac

SEQ ID NO: 2322 - DNA, 17 bp, synthetic construct
  misc_feature 1..17: note = Oligonucleotide
  source 1..17: mol_type = other DNA
gaccatgaatctggtta

SEQ ID NO: 2323 - DNA, 17 bp, synthetic construct
  misc_feature 1..17: note = Oligonucleotide
  source 1..17: mol_type = other DNA
ttagaccatgaatctgg

SEQ ID NO: 2324 - DNA, 17 bp, synthetic construct
  misc_feature 1..17: note = Oligonucleotide
  source 1..17: mol_type = other DNA
ttgttagaccatgaatc

SEQ ID NO: 2325 - DNA, 17 bp, synthetic construct
  misc_feature 1..17: note = Oligonucleotide
  source 1..17: mol_type = other DNA
agcttgttagaccatga

SEQ ID NO: 2326 - DNA, 17 bp, synthetic construct
  misc_feature 1..17: note = Oligonucleotide
  source 1..17: mol_type = other DNA
gagagcttgttagacca

SEQ ID NO: 2327 - DNA, 17 bp, synthetic construct
  misc_feature 1..17: note = Oligonucleotide
  source 1..17: mol_type = other DNA
actgagagcttgttaga

SEQ ID NO: 2328 - DNA, 17 bp, synthetic construct
  misc_feature 1..17: note = Oligonucleotide
  source 1..17: mol_type = other DNA
cacactgagagcttgtt

SEQ ID NO: 2329 - DNA, 17 bp, synthetic construct
  misc_feature 1..17: note = Oligonucleotide
  source 1..17: mol_type = other DNA
agccacactgagagctt

SEQ ID NO: 2330 - DNA, 17 bp, synthetic construct
  misc_feature 1..17: note = Oligonucleotide
  source 1..17: mol_type = other DNA
aaaagccacactgagag

SEQ ID NO: 2331 - DNA, 17 bp, synthetic construct
  misc_feature 1..17: note = Oligonucleotide
  source 1..17: mol_type = other DNA
gagaaaagccacactga

SEQ ID NO: 2332 - DNA, 17 bp, synthetic construct
  misc_feature 1..17: note = Oligonucleotide
  source 1..17: mol_type = other DNA
tcagagaaaagccacac

SEQ ID NO: 2333 - DNA, 17 bp, synthetic construct
  misc_feature 1..17: note = Oligonucleotide
  source 1..17: mol_type = other DNA
cattcagagaaaagcca

SEQ ID NO: 2334 - DNA, 17 bp, synthetic construct
  misc_feature 1..17: note = Oligonucleotide
  source 1..17: mol_type = other DNA
aagcattcagagaaaag

SEQ ID NO: 2335 - DNA, 17 bp, synthetic construct
  misc_feature 1..17: note = Oligonucleotide
  source 1..17: mol_type = other DNA
ttcaagcattcagagaa

SEQ ID NO: 2336 - DNA, 17 bp, synthetic construct
  misc_feature 1..17: note = Oligonucleotide
  source 1..17: mol_type = other DNA
aaattcaagcattcaga

SEQ ID NO: 2337 - DNA, 17 bp, synthetic construct
  misc_feature 1..17: note = Oligonucleotide
  source 1..17: mol_type = other DNA
gtgaaattcaagcattc

SEQ ID NO: 2338 - DNA, 17 bp, synthetic construct
  misc_feature 1..17: note = Oligonucleotide
  source 1..17: mol_type = other DNA
catgtgaaattcaagca

SEQ ID NO: 2339 - DNA, 17 bp, synthetic construct
  misc_feature 1..17: note = Oligonucleotide
  source 1..17: mol_type = other DNA
aggcatgtgaaattcaa

SEQ ID NO: 2340 - DNA, 17 bp, synthetic construct
  misc_feature 1..17: note = Oligonucleotide
  source 1..17: mol_type = other DNA
gcaaggcatgtgaaatt

SEQ ID NO: 2341 - DNA, 17 bp, synthetic construct
  misc_feature 1..17: note = Oligonucleotide
  source 1..17: mol_type = other DNA
aatgcaaggcatgtgaa

SEQ ID NO: 2342 - DNA, 17 bp, synthetic construct
  misc_feature 1..17: note = Oligonucleotide
  source 1..17: mol_type = other DNA
tgaaatgcaaggcatgt

SEQ ID NO: 2343 - DNA, 17 bp, synthetic construct
  misc_feature 1..17: note = Oligonucleotide
  source 1..17: mol_type = other DNA
ctgtgaaatgcaaggca

SEQ ID NO: 2344 - DNA, 17 bp, synthetic construct
  misc_feature 1..17: note = Oligonucleotide
  source 1..17: mol_type = other DNA
caactgtgaaatgcaag

SEQ ID NO: 2345 - DNA, 17 bp, synthetic construct
  misc_feature 1..17: note = Oligonucleotide
  source 1..17: mol_type = other DNA
gtacaactgtgaaatgc

SEQ ID NO: 2346 - DNA, 17 bp, synthetic construct
  misc_feature 1..17: note = Oligonucleotide
  source 1..17: mol_type = other DNA
ggagtacaactgtgaaa

SEQ ID NO: 2347 - DNA, 17 bp, synthetic construct
  misc_feature 1..17: note = Oligonucleotide
  source 1..17: mol_type = other DNA
catggagtacaactgtg

SEQ ID NO: 2348 - DNA, 17 bp, synthetic construct
  misc_feature 1..17: note = Oligonucleotide
  source 1..17: mol_type = other DNA
gaccatggagtacaact

SEQ ID NO: 2349 - DNA, 17 bp, synthetic construct
  misc_feature 1..17: note = Oligonucleotide
  source 1..17: mol_type = other DNA
gttgaccatggagtaca

SEQ ID NO: 2350 - DNA, 17 bp, synthetic construct
  misc_feature 1..17: note = Oligonucleotide
  source 1..17: mol_type = other DNA
ccggttgaccatggagt

SEQ ID NO: 2351 - DNA, 17 bp, synthetic construct
  misc_feature 1..17: note = Oligonucleotide
  source 1..17: mol_type = other DNA
gcaccggttgaccatgg

SEQ ID NO: 2352 - DNA, 17 bp, synthetic construct
  misc_feature 1..17: note = Oligonucleotide
  source 1..17: mol_type = other DNA
aaagcaccggttgacca

SEQ ID NO: 2353 - DNA, 17 bp, synthetic construct
  misc_feature 1..17: note = Oligonucleotide
  source 1..17: mol_type = other DNA
aaaaaagcaccggttga

SEQ ID NO: 2354 - DNA, 17 bp, synthetic construct
  misc_feature 1..17: note = Oligonucleotide
  source 1..17: mol_type = other DNA
tgaaaaaaagcaccggt

SEQ ID NO: 2355 - DNA, 17 bp, synthetic construct
  misc_feature 1..17: note = Oligonucleotide
  source 1..17: mol_type = other DNA
atgtgaaaaaaagcacc

SEQ ID NO: 2356 - DNA, 17 bp, synthetic construct
  misc_feature 1..17: note = Oligonucleotide
  source 1..17: mol_type = other DNA
acgatgtgaaaaaaagc

SEQ ID NO: 2357 - DNA, 17 bp, synthetic construct
  misc_feature 1..17: note = Oligonucleotide
  source 1..17: mol_type = other DNA
accacgatgtgaaaaaa

SEQ ID NO: 2358 - DNA, 17 bp, synthetic construct
  misc_feature 1..17: note = Oligonucleotide
  source 1..17: mol_type = other DNA
agtaccacgatgtgaaa

SEQ ID NO: 2359 - DNA, 17 bp, synthetic construct
  misc_feature 1..17: note = Oligonucleotide
  source 1..17: mol_type = other DNA
acaagtaccacgatgtg

SEQ ID NO: 2360 - DNA, 17 bp, synthetic construct
  misc_feature 1..17: note = Oligonucleotide
  source 1..17: mol_type = other DNA
ttgacaagtaccacgat

SEQ ID NO: 2361 - DNA, 17 bp, synthetic construct
  misc_feature 1..17: note = Oligonucleotide
  source 1..17: mol_type = other DNA
gttttgacaagtaccac

SEQ ID NO: 2362 - DNA, 17 bp, synthetic construct
  misc_feature 1..17: note = Oligonucleotide
  source 1..17: mol_type = other DNA
aatgttttgacaagtac

SEQ ID NO: 2363 - DNA, 17 bp, synthetic construct
  misc_feature 1..17: note = Oligonucleotide
  source 1..17: mol_type = other DNA
caaaatgttttgacaag

SEQ ID NO: 2364 - DNA, 17 bp, synthetic construct
  misc_feature 1..17: note = Oligonucleotide
  source 1..17: mol_type = other DNA
taacaaaatgttttgac

SEQ ID NO: 2365 - DNA, 17 bp, synthetic construct
  misc_feature 1..17: note = Oligonucleotide
  source 1..17: mol_type = other DNA
aaataacaaaatgtttt

SEQ ID NO: 2366 - DNA, 17 bp, synthetic construct
  misc_feature 1..17: note = Oligonucleotide
  source 1..17: mol_type = other DNA
ggaaaataacaaaatgt

SEQ ID NO: 2367 - DNA, 17 bp, synthetic construct
  misc_feature 1..17: note = Oligonucleotide
  source 1..17: mol_type = other DNA
caaggaaaataacaaaa

SEQ ID NO: 2368 - DNA, 17 bp, synthetic construct
  misc_feature 1..17: note = Oligonucleotide
  source 1..17: mol_type = other DNA
taccaaggaaaataaca

SEQ ID NO: 2369 - DNA, 17 bp, synthetic construct
  misc_feature 1..17: note = Oligonucleotide
  source 1..17: mol_type = other DNA
ttttaccaaggaaaata

SEQ ID NO: 2370 - DNA, 17 bp, synthetic construct
  misc_feature 1..17: note = Oligonucleotide
  source 1..17: mol_type = other DNA
atattttaccaaggaaa

SEQ ID NO: 2371 - DNA, 17 bp, synthetic construct
  misc_feature 1..17: note = Oligonucleotide
  source 1..17: mol_type = other DNA
tatatattttaccaagg

SEQ ID NO: 2372 - DNA, 17 bp, synthetic construct
  misc_feature 1..17: note = Oligonucleotide
  source 1..17: mol_type = other DNA
ttttatatattttacca

SEQ ID NO: 2373 - DNA, 17 bp, synthetic construct
  misc_feature 1..17: note = Oligonucleotide
  source 1..17: mol_type = other DNA
cttttttatatatttta

SEQ ID NO: 2374 - DNA, 17 bp, synthetic construct
  misc_feature 1..17: note = Oligonucleotide
  source 1..17: mol_type = other DNA
aaccttttttatatatt

SEQ ID NO: 2375 - DNA, 17 bp, synthetic construct
  misc_feature 1..17: note = Oligonucleotide
  source 1..17: mol_type = other DNA
gaaaaccttttttatat

SEQ ID NO: 2376 - DNA, 17 bp, synthetic construct
  misc_feature 1..17: note = Oligonucleotide
  source 1..17: mol_type = other DNA
ttagaaaacctttttta

SEQ ID NO: 2377 - DNA, 17 bp, synthetic construct
  misc_feature 1..17: note = Oligonucleotide
  source 1..17: mol_type = other DNA
aaattagaaaacctttt

SEQ ID NO: 2378 - DNA, 17 bp, synthetic construct
  misc_feature 1..17: note = Oligonucleotide
  source 1..17: mol_type = other DNA
gtgaaattagaaaacct

SEQ ID NO: 2379 - DNA, 17 bp, synthetic construct
  misc_feature 1..17: note = Oligonucleotide
  source 1..17: mol_type = other DNA
aaagtgaaattagaaaa

SEQ ID NO: 2380 - DNA, 17 bp, synthetic construct
  misc_feature 1..17: note = Oligonucleotide
  source 1..17: mol_type = other DNA
agcaaagtgaaattaga

SEQ ID NO: 2381 - DNA, 17 bp, synthetic construct
  misc_feature 1..17: note = Oligonucleotide
  source 1..17: mol_type = other DNA
ggcagcaaagtgaaatt

SEQ ID NO: 2382 - DNA, 17 bp, synthetic construct
  misc_feature 1..17: note = Oligonucleotide
  source 1..17: mol_type = other DNA
cttggcagcaaagtgaa

SEQ ID NO: 2383 - DNA, 17 bp, synthetic construct
  misc_feature 1..17: note = Oligonucleotide
  source 1..17: mol_type = other DNA
agccttggcagcaaagt

SEQ ID NO: 2384 - DNA, 17 bp, synthetic construct
  misc_feature 1..17: note = Oligonucleotide
  source 1..17: mol_type = other DNA
gacagccttggcagcaa

SEQ ID NO: 2385 - DNA, 17 bp, synthetic construct
  misc_feature 1..17: note = Oligonucleotide
  source 1..17: mol_type = other DNA
aatgacagccttggcag

SEQ ID NO: 2386 - DNA, 17 bp, synthetic construct
  misc_feature 1..17: note = Oligonucleotide
  source 1..17: mol_type = other DNA
gaaaatgacagccttgg

SEQ ID NO: 2387 - DNA, 17 bp, synthetic construct
  misc_feature 1..17: note = Oligonucleotide
  source 1..17: mol_type = other DNA
aatgaaaatgacagcct

SEQ ID NO: 2388 - DNA, 17 bp, synthetic construct
  misc_feature 1..17: note = Oligonucleotide
  source 1..17: mol_type = other DNA
attaatgaaaatgacag

SEQ ID NO: 2389 - DNA, 17 bp, synthetic construct
  misc_feature 1..17: note = Oligonucleotide
  source 1..17: mol_type = other DNA
agcattaatgaaaatga

SEQ ID NO: 2390 - DNA, 17 bp, synthetic construct
  misc_feature 1..17: note = Oligonucleotide
  source 1..17: mol_type = other DNA
ggcagcattaatgaaaa

SEQ ID NO: 2391 - DNA, 17 bp, synthetic construct
  misc_feature 1..17: note = Oligonucleotide
  source 1..17: mol_type = other DNA
gttggcagcattaatga

SEQ ID NO: 2392 - DNA, 17 bp, synthetic construct
  misc_feature 1..17: note = Oligonucleotide
  source 1..17: mol_type = other DNA
catgttggcagcattaa

SEQ ID NO: 2393 - DNA, 17 bp, synthetic construct
  misc_feature 1..17: note = Oligonucleotide
  source 1..17: mol_type = other DNA
gaacatgttggcagcat

SEQ ID NO: 2394 - DNA, 17 bp, synthetic construct
  misc_feature 1..17: note = Oligonucleotide
  source 1..17: mol_type = other DNA
tatgaacatgttggcag

SEQ ID NO: 2395 - DNA, 17 bp, synthetic construct
  misc_feature 1..17: note = Oligonucleotide
  source 1..17: mol_type = other DNA
tcatatgaacatgttgg

SEQ ID NO: 2396 - DNA, 17 bp, synthetic construct
  misc_feature 1..17: note = Oligonucleotide
  source 1..17: mol_type = other DNA
gcctcatatgaacatgt

SEQ ID NO: 2397 - DNA, 17 bp, synthetic construct
  misc_feature 1..17: note = Oligonucleotide
  source 1..17: mol_type = other DNA
taagcctcatatgaaca

SEQ ID NO: 2398 - DNA, 17 bp, synthetic construct
  misc_feature 1..17: note = Oligonucleotide
  source 1..17: mol_type = other DNA
tagtaagcctcatatga

SEQ ID NO: 2399 - DNA, 17 bp, synthetic construct
  misc_feature 1..17: note = Oligonucleotide
  source 1..17: mol_type = other DNA
tcttagtaagcctcata

SEQ ID NO: 2400 - DNA, 17 bp, synthetic construct
  misc_feature 1..17: note = Oligonucleotide
  source 1..17: mol_type = other DNA
acttcttagtaagcctc

SEQ ID NO: 2401 - DNA, 17 bp, synthetic construct
  misc_feature 1..17: note = Oligonucleotide
  source 1..17: mol_type = other DNA
ataacttcttagtaagc

SEQ ID NO: 2402 - DNA, 17 bp, synthetic construct
  misc_feature 1..17: note = Oligonucleotide
  source 1..17: mol_type = other DNA
gttataacttcttagta

SEQ ID NO: 2403 - DNA, 17 bp, synthetic construct
  misc_feature 1..17: note = Oligonucleotide
  source 1..17: mol_type = other DNA
ttagttataacttctta

SEQ ID NO: 2404 - DNA, 17 bp, synthetic construct
  misc_feature 1..17: note = Oligonucleotide
  source 1..17: mol_type = other DNA
agcttagttataacttc

SEQ ID NO: 2405 - DNA, 17 bp, synthetic construct
  misc_feature 1..17: note = Oligonucleotide
  source 1..17: mol_type = other DNA
taaagcttagttataac

SEQ ID NO: 2406 - DNA, 17 bp, synthetic construct
  misc_feature 1..17: note = Oligonucleotide
  source 1..17: mol_type = other DNA
ttctaaagcttagttat

SEQ ID NO: 2407 - DNA, 17 bp, synthetic construct
  misc_feature 1..17: note = Oligonucleotide
  source 1..17: mol_type = other DNA
cagttctaaagcttagt

SEQ ID NO: 2408 - DNA, 17 bp, synthetic construct
  misc_feature 1..17: note = Oligonucleotide
  source 1..17: mol_type = other DNA
ttccagttctaaagctt

SEQ ID NO: 2409 - DNA, 17 bp, synthetic construct
  misc_feature 1..17: note = Oligonucleotide
  source 1..17: mol_type = other DNA
ctcttccagttctaaag

SEQ ID NO: 2410 - DNA, 17 bp, synthetic construct
  misc_feature 1..17: note = Oligonucleotide
  source 1..17: mol_type = other DNA
agtctcttccagttcta

SEQ ID NO: 2411 - DNA, 17 bp, synthetic construct
  misc_feature 1..17: note = Oligonucleotide
  source 1..17: mol_type = other DNA
taaagtctcttccagtt

SEQ ID NO: 2412 - DNA, 17 bp, synthetic construct
  misc_feature 1..17: note = Oligonucleotide
  source 1..17: mol_type = other DNA
aattaaagtctcttcca

SEQ ID NO: 2413 - DNA, 17 bp, synthetic construct
  misc_feature 1..17: note = Oligonucleotide
  source 1..17: mol_type = other DNA
tgaaattaaagtctctt

SEQ ID NO: 2414 - DNA, 17 bp, synthetic construct
  misc_feature 1..17: note = Oligonucleotide
  source 1..17: mol_type = other DNA
agatgaaattaaagtct

SEQ ID NO: 2415 - DNA, 17 bp, synthetic construct
  misc_feature 1..17: note = Oligonucleotide
  source 1..17: mol_type = other DNA
ggtagatgaaattaaag

SEQ ID NO: 2416 - DNA, 17 bp, synthetic construct
  misc_feature 1..17: note = Oligonucleotide
  source 1..17: mol_type = other DNA
gatggtagatgaaatta

SEQ ID NO: 2417 - DNA, 17 bp, synthetic construct
  misc_feature 1..17: note = Oligonucleotide
  source 1..17: mol_type = other DNA
tcagatggtagatgaaa

SEQ ID NO: 2418 - DNA, 17 bp, synthetic construct
  misc_feature 1..17: note = Oligonucleotide
  source 1..17: mol_type = other DNA
taatcagatggtagatg

SEQ ID NO: 2419 - DNA, 17 bp, synthetic construct
  misc_feature 1..17: note = Oligonucleotide
  source 1..17: mol_type = other DNA
ttataatcagatggtag

SEQ ID NO: 2420 - DNA, 17 bp, synthetic construct
  misc_feature 1..17: note = Oligonucleotide
  source 1..17: mol_type = other DNA
agtttataatcagatgg

SEQ ID NO: 2421 - DNA, 17 bp, synthetic construct
  misc_feature 1..17: note = Oligonucleotide
  source 1..17: mol_type = other DNA
aggagtttataatcaga

SEQ ID NO: 2422 - DNA, 17 bp, synthetic construct
  misc_feature 1..17: note = Oligonucleotide
  source 1..17: mol_type = other DNA
aacaggagtttataatc

SEQ ID NO: 2423 - DNA, 17 bp, synthetic construct
  misc_feature 1..17: note = Oligonucleotide
  source 1..17: mol_type = other DNA
agtaacaggagtttata

SEQ ID NO: 2424 - DNA, 17 bp, synthetic construct
  misc_feature 1..17: note = Oligonucleotide
  source 1..17: mol_type = other DNA
gtgagtaacaggagttt

SEQ ID NO: 2425 - DNA, 17 bp, synthetic construct
  misc_feature 1..17: note = Oligonucleotide
  source 1..17: mol_type = other DNA
aaagtgagtaacaggag

SEQ ID NO: 2426 - DNA, 17 bp, synthetic construct
  misc_feature 1..17: note = Oligonucleotide
  source 1..17: mol_type = other DNA
aacaaagtgagtaacag

SEQ ID NO: 2427 - DNA, 17 bp, synthetic construct
  misc_feature 1..17: note = Oligonucleotide
  source 1..17: mol_type = other DNA
aataacaaagtgagtaa

SEQ ID NO: 2428 - DNA, 17 bp, synthetic construct
  misc_feature 1..17: note = Oligonucleotide
  source 1..17: mol_type = other DNA
aggaataacaaagtgag

SEQ ID NO: 2429 - DNA, 17 bp, synthetic construct
  misc_feature 1..17: note = Oligonucleotide
  source 1..17: mol_type = other DNA
tggaggaataacaaagt

SEQ ID NO: 2430 - DNA, 17 bp, synthetic construct
  misc_feature 1..17: note = Oligonucleotide
  source 1..17: mol_type = other DNA
ttctggaggaataacaa

SEQ ID NO: 2431 - DNA, 17 bp, synthetic construct
  misc_feature 1..17: note = Oligonucleotide
  source 1..17: mol_type = other DNA
aagttctggaggaataa

SEQ ID NO: 2432 - DNA, 17 bp, synthetic construct
  misc_feature 1..17: note = Oligonucleotide
  source 1..17: mol_type = other DNA
gcaaagttctggaggaa

SEQ ID NO: 2433 - DNA, 17 bp, synthetic construct
  misc_feature 1..17: note = Oligonucleotide
  source 1..17: mol_type = other DNA
tgagcaaagttctggag

SEQ ID NO: 2434 - DNA, 17 bp, synthetic construct
  misc_feature 1..17: note = Oligonucleotide
  source 1..17: mol_type = other DNA
ttatgagcaaagttctg

SEQ ID NO: 2435 - DNA, 17 bp, synthetic construct
  misc_feature 1..17: note = Oligonucleotide
  source 1..17: mol_type = other DNA
catttatgagcaaagtt

SEQ ID NO: 2436 - DNA, 17 bp, synthetic construct
  misc_feature 1..17: note = Oligonucleotide
  source 1..17: mol_type = other DNA
tatcatttatgagcaaa

SEQ ID NO: 2437 - DNA, 17 bp, synthetic construct
  misc_feature 1..17: note = Oligonucleotide
  source 1..17: mol_type = other DNA
aggtatcatttatgagc

SEQ ID NO: 2438 - DNA, 17 bp, synthetic construct
  misc_feature 1..17: note = Oligonucleotide
  source 1..17: mol_type = other DNA
agtaggtatcatttatg

SEQ ID NO: 2439 - DNA, 17 bp, synthetic construct
  misc_feature 1..17: note = Oligonucleotide
  source 1..17: mol_type = other DNA
attagtaggtatcattt

SEQ ID NO: 2440 - DNA, 17 bp, synthetic construct
  misc_feature 1..17: note = Oligonucleotide
  source 1..17: mol_type = other DNA
acaattagtaggtatca

SEQ ID NO: 2441 - DNA, 17 bp, synthetic construct
  misc_feature 1..17: note = Oligonucleotide
  source 1..17: mol_type = other DNA
tcgacaattagtaggta

SEQ ID NO: 2442 - DNA, 17 bp, synthetic construct
  misc_feature 1..17: note = Oligonucleotide
  source 1..17: mol_type = other DNA
tgatcgacaattagtag

SEQ ID NO: 2443 - DNA, 17 bp, synthetic construct
  misc_feature 1..17: note = Oligonucleotide
  source 1..17: mol_type = other DNA
caatgatcgacaattag

SEQ ID NO: 2444 - DNA, 17 bp, synthetic construct
  misc_feature 1..17: note = Oligonucleotide
  source 1..17: mol_type = other DNA
atccaatgatcgacaat

SEQ ID NO: 2445 - DNA, 17 bp, synthetic construct
  misc_feature 1..17: note = Oligonucleotide
  source 1..17: mol_type = other DNA
catatccaatgatcgac

SEQ ID NO: 2446 - DNA, 17 bp, synthetic construct
  misc_feature 1..17: note = Oligonucleotide
  source 1..17: mol_type = other DNA
tgacatatccaatgatc

SEQ ID NO: 2447 - DNA, 17 bp, synthetic construct
  misc_feature 1..17: note = Oligonucleotide
  source 1..17: mol_type = other DNA
acttgacatatccaatg

SEQ ID NO: 2448 - DNA, 17 bp, synthetic construct
  misc_feature 1..17: note = Oligonucleotide
  source 1..17: mol_type = other DNA
ctaacttgacatatcca

SEQ ID NO: 2449 - DNA, 17 bp, synthetic construct
  misc_feature 1..17: note = Oligonucleotide
  source 1..17: mol_type = other DNA
tacctaacttgacatat

SEQ ID NO: 2450 - DNA, 17 bp, synthetic construct
  misc_feature 1..17: note = Oligonucleotide
  source 1..17: mol_type = other DNA
cgctacctaacttgaca

SEQ ID NO: 2451 - DNA, 17 bp, synthetic construct
  misc_feature 1..17: note = Oligonucleotide
  source 1..17: mol_type = other DNA
atacgctacctaacttg

SEQ ID NO: 2452 - DNA, 17 bp, synthetic construct
  misc_feature 1..17: note = Oligonucleotide
  source 1..17: mol_type = other DNA
cctatacgctacctaac

SEQ ID NO: 2453 - DNA, 17 bp, synthetic construct
  misc_feature 1..17: note = Oligonucleotide
  source 1..17: mol_type = other DNA
acacctatacgctacct

SEQ ID NO: 2454 - DNA, 17 bp, synthetic construct
  misc_feature 1..17: note = Oligonucleotide
  source 1..17: mol_type = other DNA
ggcacacctatacgcta

SEQ ID NO: 2455 - DNA, 17 bp, synthetic construct
  misc_feature 1..17: note = Oligonucleotide
  source 1..17: mol_type = other DNA
gaaggcacacctatacg

SEQ ID NO: 2456 - DNA, 17 bp, synthetic construct
  misc_feature 1..17: note = Oligonucleotide
  source 1..17: mol_type = other DNA
taagaaggcacacctat

SEQ ID NO: 2457 - DNA, 17 bp, synthetic construct
  misc_feature 1..17: note = Oligonucleotide
  source 1..17: mol_type = other DNA
aattaagaaggcacacc

SEQ ID NO: 2458 - DNA, 17 bp, synthetic construct
  misc_feature 1..17: note = Oligonucleotide
  source 1..17: mol_type = other DNA
aggaattaagaaggcac

SEQ ID NO: 2459 - DNA, 17 bp, synthetic construct
  misc_feature 1..17: note = Oligonucleotide
  source 1..17: mol_type = other DNA
tgaaggaattaagaagg

SEQ ID NO: 2460 - DNA, 17 bp, synthetic construct
  misc_feature 1..17: note = Oligonucleotide
  source 1..17: mol_type = other DNA
ttctgaaggaattaaga

SEQ ID NO: 2461 - DNA, 17 bp, synthetic construct
  misc_feature 1..17: note = Oligonucleotide
  source 1..17: mol_type = other DNA
atcttctgaaggaatta

SEQ ID NO: 2462 - DNA, 17 bp, synthetic construct
  misc_feature 1..17: note = Oligonucleotide
  source 1..17: mol_type = other DNA
tgcatcttctgaaggaa

SEQ ID NO: 2463 - DNA, 17 bp, synthetic construct
  misc_feature 1..17: note = Oligonucleotide
  source 1..17: mol_type = other DNA
ctctgcatcttctgaag

SEQ ID NO: 2464 - DNA, 17 bp, synthetic construct
  misc_feature 1..17: note = Oligonucleotide
  source 1..17: mol_type = other DNA
tgcctctgcatcttctg

SEQ ID NO: 2465 - DNA, 17 bp, synthetic construct
  misc_feature 1..17: note = Oligonucleotide
  source 1..17: mol_type = other DNA
tcttgcctctgcatctt

SEQ ID NO: 2466 - DNA, 17 bp, synthetic construct
  misc_feature 1..17: note = Oligonucleotide
  source 1..17: mol_type = other DNA
tgttcttgcctctgcat

SEQ ID NO: 2467 - DNA, 17 bp, synthetic construct
  misc_feature 1..17: note = Oligonucleotide
  source 1..17: mol_type = other DNA
acatgttcttgcctctg

SEQ ID NO: 2468 - DNA, 17 bp, synthetic construct
  misc_feature 1..17: note = Oligonucleotide
  source 1..17: mol_type = other DNA
gaaacatgttcttgcct

SEQ ID NO: 2469 - DNA, 17 bp, synthetic construct
  misc_feature 1..17: note = Oligonucleotide
  source 1..17: mol_type = other DNA
attgaaacatgttcttg

SEQ ID NO: 2470 - DNA, 17 bp, synthetic construct
  misc_feature 1..17: note = Oligonucleotide
  source 1..17: mol_type = other DNA
acgattgaaacatgttc

SEQ ID NO: 2471 - DNA, 17 bp, synthetic construct
  misc_feature 1..17: note = Oligonucleotide
  source 1..17: mol_type = other DNA
aacacgattgaaacatg

SEQ ID NO: 2472 - DNA, 17 bp, synthetic construct
  misc_feature 1..17: note = Oligonucleotide
  source 1..17: mol_type = other DNA
gctaacacgattgaaac

SEQ ID NO: 2473 - DNA, 17 bp, synthetic construct
  misc_feature 1..17: note = Oligonucleotide
  source 1..17: mol_type = other DNA
aatgctaacacgattga

SEQ ID NO: 2474 - DNA, 17 bp, synthetic construct
  misc_feature 1..17: note = Oligonucleotide
  source 1..17: mol_type = other DNA
accaatgctaacacgat

SEQ ID NO: 2475 - DNA, 17 bp, synthetic construct
  misc_feature 1..17: note = Oligonucleotide
  source 1..17: mol_type = other DNA
aaaaccaatgctaacac

SEQ ID NO: 2476 - DNA, 17 bp, synthetic construct
  misc_feature 1..17: note = Oligonucleotide
  source 1..17: mol_type = other DNA
aagaaaaccaatgctaa

SEQ ID NO: 2477 - DNA, 17 bp, synthetic construct
  misc_feature 1..17: note = Oligonucleotide
  source 1..17: mol_type = other DNA
ataaagaaaaccaatgc

SEQ ID NO: 2478 - DNA, 17 bp, synthetic construct
  misc_feature 1..17: note = Oligonucleotide
  source 1..17: mol_type = other DNA
ctgataaagaaaaccaa

SEQ ID NO: 2479 - DNA, 17 bp, synthetic construct
  misc_feature 1..17: note = Oligonucleotide
  source 1..17: mol_type = other DNA
gcactgataaagaaaac

SEQ ID NO: 2480 - DNA, 17 bp, synthetic construct
  misc_feature 1..17: note = Oligonucleotide
  source 1..17: mol_type = other DNA
ttagcactgataaagaa

SEQ ID NO: 2481 - DNA, 17 bp, synthetic construct
  misc_feature 1..17: note = Oligonucleotide
  source 1..17: mol_type = other DNA
ctgttagcactgataaa

SEQ ID NO: 2482 - DNA, 17 bp, synthetic construct
  misc_feature 1..17: note = Oligonucleotide
  source 1..17: mol_type = other DNA
agtctgttagcactgat

SEQ ID NO: 2483 - DNA, 17 bp, synthetic construct
  misc_feature 1..17: note = Oligonucleotide
  source 1..17: mol_type = other DNA
ctgagtctgttagcact

SEQ ID NO: 2484 - DNA, 17 bp, synthetic construct
  misc_feature 1..17: note = Oligonucleotide
  source 1..17: mol_type = other DNA
acactgagtctgttagc

SEQ ID NO: 2485 - DNA, 17 bp, synthetic construct
  misc_feature 1..17: note = Oligonucleotide
  source 1..17: mol_type = other DNA
ctcacactgagtctgtt

SEQ ID NO: 2486 - DNA, 17 bp, synthetic construct
  misc_feature 1..17: note = Oligonucleotide
  source 1..17: mol_type = other DNA
ggcctcacactgagtct

SEQ ID NO: 2487 - DNA, 17 bp, synthetic construct
  misc_feature 1..17: note = Oligonucleotide
  source 1..17: mol_type = other DNA
tggggcctcacactgag

SEQ ID NO: 2488 - DNA, 17 bp, synthetic construct
  misc_feature 1..17: note = Oligonucleotide
  source 1..17: mol_type = other DNA
gtatggggcctcacact

SEQ ID NO: 2489 - DNA, 6428 bp, Homo sapiens
  source 1..6428: mol_type = genomic DNA
aggctcttgcggaagtccatgcgccattgggagggcctcggccgcggctctgtgcccttgctgctgagggccacttcctgggtcattcctggaccgggagccgggctggggctcacacgggggctcccgcgtggccgtctcggcgcctgcgtgacctccccgccggcgggatgtggcgactacgtcgggccgctgtggcctgtgaggtctgccagtctttagtgaaacacagctctggaataaaaggaagtttaccactacaaaaactacatctggtttcacgaagcatttatcattcacatcatcctaccttaaagcttcaacgaccccaattaaggacatcctttcagcagttctcttctctgacaaaccttcctttacgtaaactgaaattctctccaattaaatatggctaccagcctcgcaggaatttttggccagcaagattagctacgagactcttaaaacttcgctatctcatactaggatcggctgttgggggtggctacacagccaaaaagacttttgatcagtggaaagatatgataccggaccttagtgaatataaatggattgtgcctgacattgtgtgggaaattgatgagtatatcgattttgagaaaattagaaaagcccttcctagttcagaagaccttgtaaagttagcaccagactttgacaagattgttgaaagccttagcttattgaaggacttttttacctcaggtcacaaattggttagtgaagtcataggagcttctgacctacttctcttgttaggttctccggaagaaacggcgtttagagcaacagatcgtggatctgaaagtgacaagcattttagaaagggtctgcttggtgagctcattctcttacaacaacaaattcaagagcatgaagaggaagcgcgcagagccgctggccaatatagcacgagctatgcccaacagaagcgcaaggtgtcagacaaagagaaaattgaccaacttcaggaagaacttctgcacactcagttgaagtatcagagaatcttggaacgattagaaaaggagaacaaagaattgagaaaattagtattgcagaaagatgacaaaggcattcatcatagaaagcttaagaaatctttgattgacatgtattctgaagttcttgatgttctctctgattatgatgccagttataatacgcaagatcatctgccacgggttgttgtggttggagatcagagtgctggaaagactagtgtgttggaaatgattgcccaagctcgaatattcccaagaggatctggggagatgatgacacgttctccagttaaggtgactctgagtgaaggtcctcaccatgtggccctatttaaagatagttctcgggagtttgatcttaccaaagaagaagatcttgcagcattaagacatgaaatagaacttcgaatgaggaaaaatgtgaaagaaggctgtaccgttagccctgagaccatatccttaaatgtaaaaggccctggactacagaggatggtgcttgttgacttaccaggtgtgattaatactgtgacatcaggcatggctcctgacacaaaggaaactattttcagtatcagcaaagcttacatgcagaatcctaatgccatcatactgtgtattcaagatggatctgtggatgctgaacgcagtattgttacagacttggtcagtcaaatggaccctcatggaaggagaaccatattcgttttgaccaaagtagacctggcagagaaaaatgtagccagtccaagcaggattcagcagataattgaaggaaagctcttcccaatgaaagctttaggttattttgctgttgtaacaggaaaagggaacagctctgaaagcattgaagctataagagaatatgaagaagagttttttcagaattcaaagctcctaaagacaagcatgctaaaggcacaccaagtgactacaagaaatttaagccttgcagtatcagactgcttttggaaaatggtacgagagtctgttgaacaacaggctgatagtttcaaagcaacacgttttaaccttgaaactgaatggaagaataactatcctcgcctgcgggaacttgaccggaatgaactatttgaaaaagctaaaaatgaaatccttgatgaagttatcagtctgagccaggttacaccaaaacattgggaggaaatccttcaacaatctttgtgggaaagagtatcaactcatgtgattgaaaacatctaccttccagctgcgcagaccatgaattcaggaacttttaacaccacagtggatatcaagcttaaacagtggactgataaacaacttcctaataaagcagtagaggttgcttgggagaccctacaagaagaattttcccgctttatgacagaaccgaaagggaaagagcatgatgacatatttgataaacttaaagaggctgttaaggaagaaagtattaaacgacacaagtggaatgactttgcggaggacagcttgagggttattcaacacaatgctttggaagaccgatccatatctgataaacagcaatgggatgcagctatttattttatggaagaggctctgcaggctcgtctcaaggatactgaaaatgcaattgaaaacatggtgggtccagactggaaaaagaggtggttatactggaagaatcggacccaagaacagtgtgttcacaatgaaaccaagaatgaattggagaagatgttgaaatgtaatgaggagcacccagcttatcttgcaagtgatgaaataaccacagtccggaagaaccttgaatcccgaggagtagaagtagatccaagcttgattaaggatacttggcatcaagtttatagaagacattttttaaaaacagctctaaaccattgtaacctttgtcgaagaggtttttattactaccaaaggcattttgtagattctgagttggaatgcaatgatgtggtcttgttttggcgtatacagcgcatgcttgctatcaccgcaaatactttaaggcaacaacttacaaatactgaagttaggcgattagagaaaaatgttaaagaggtattggaagattttgctgaagatggtgagaagaagattaaattgcttactggtaaacgcgttcaactggcggaagacctcaagaaagttagagaaattcaagaaaaacttgatgctttcattgaagctcttcatcaggagaaataaattaaaatcgtactcataatcagctctgcatacatctgaagaacaaaaacatcaacgtcttttgtccagcctctttttcttctgctgttccacctttctaaacatacaataaagtcatgggataaaaataatcgatgtatgttacgggcgctttaaccatcagctgcctctcgaatggaagaacagtggtaatggattaacatcctattttgttgtactaaagtgacaaatcggaataatataattggtatggccattaggttcagtccttgaagataagaaacttgttctctgtttgttgtcttatttgtggtggcactcgtttaatggattaactgaggttgctcaatgttcagtttcttttccagaaatacaatgctaggtgttttgaaataaaacttatatagcaattgtttaaagttatcaattgtatataaaatcacagtagcctgctaaatcattgtatgtgtctgtagtattctattcccagaaactatttgaccatgataattcagtttatattcaccacatgaaagaaaaatgggtaacagaagaacccttaaaacaggttaatttggattgtaacgttcagtgaaagaaatttcaacccttcatagccagcgaagaaatttgccttggaagccaagtcagtaccagcttacctatttgattcagttgctgttttctcactctctatatccatttgaaattgatttattttagatgttgtatacttacgttaggctttctgttaatagtggtttttctcctgttgacagagccaccggattatgacacaggatgaggaagattaaggataatcaattgactaatttcatttagaatattatcaaacatttcaactaggtatcagaaaaaggctttctttcataagactattttaaatagaaattatttcaacaattaaagtaatgttgaccatccccctctcagctgaataaagaaaaatttagttcaatttattgcaatttaattacaatactaccttcacaacattttcatgtgttttaaataaatattttttaattggctaaaggacattcaagcaaagaaatgctttctttacttaaaatgtctatctcatttgctgccttttcactaagcctttactttgttaataaaagtgtccattgtgtgatgtttttgattttacagtttgctaaatcttattttcttggagttgctttttggtaacagccccattgctactccccattttattgttttacatcaatgcatgcttcgttgtgatccctcaagatgtaacacttggtatgctcggttgaggatatgaaaaaatacttccgaaaccaggaattcaatgtatgtttgttttatactgtttgataagaaaagtaggtccagccttaagcagcacagatgcgctggtagatgcatagtcaggaactttttttatttcttttaggtctagggacaggagtgaatagaaagggaggagagctctattatgttctatacacagattaggagatgaccttactgggtacacccctctaaccagtgcttacaggttaatgcatgttaatgaatatttttgcagttgtaaagcataacaattacaactacacatctatttctaaagaataaaacaggaccatatttatttacttctgtcaactatagaaagaaagaccttcagctgtatttccacagatttctcccaaggaaaaggctaatattagtcactactgttatcacatccctttgtataagttttaaaaagagatggagggagatcttcatttctttgaggagatcagtattgtaacgtatgtgaatagatgataacaattaatattactaaaagtcccacatgagagtcctgacgccctctccatgccccacagtaatgtggcttctttcatgggtttttttttcttctttttagctgatctcatcctaagcatgctttatttttccttgaaagctaggtatttatcaactgcagatgttattgaaagaaaataaaattcagtctcaagagtaaaccctgtgtcttgtgtctgtagttcaaaagtcagaaatgattctaatttaaacaaaaagatactaaatatacagaagttaaattcgaactagccacagaatcatttgtttttatgtcagaatttgcaaagagtggagtggacaaagctctgtatggaagactgaacaactgtaaatagatgatatccaaacttaatttggctaggacttcaattttaaaaatcagtgtacctaggcagtgcacagcacgaaataagtggcccttgcagcttccccgtttaacccactgtgctatagttgcgggtggaacagtcaacctttctagtagtttatgatattgccctctttgtattcccattttctacagttttttccgcagacttctttctgcaaattattcagcctccaaatgcaaatgaatgatataaaaataagtagggaacatggcagagagtggtgcttcccagcctcacaatgtgggaatttgacataggatgagagtcagagtataggtttaaaagataaaatctttagttaataattttgtatttatttattctagatgtatgtatctgaggaaagaaatctggtatttttgctttccaataaaggggatcaaagtaatggtttttctctcagttctctaagctggtctatgttatagctctagcagtatggaaatgtgctttaaaatatgcttaccttttgaatgatcatggctatatgttgttgagatatttgaaacttaccttgttttcacttgtgcactgtgaatgaactttgtattatttttttaaaaccttcacattacgtgtagatattattgcaacttatattttgcctgagcttgatcaaaggtctttgtgtagatgagtaattaaaaaatatttaaatcacattataattctattattggagagcatcttttaaatttttttctgttttaacgagggaaagagaaacctgtatacctagggtcattatttgaccccatagtataaccagattcatggtctaacaagctctcagtgtggcttttctctgaatgcttgaatttcacatgccttgcatttcacagttgtactccatggtcaaccggtgctttttttcacatcgtggtacttgtcaaaacattttgttattttccttggtaaaatatataaaaaaggttttctaatttca

SEQ ID NO: 2490 - protein, 960 aa, Homo sapiens
MWRLRRAAVACEVCQSLVKHSSGIKGSLPLQKLHLVSRSIYHSHHPTLKLQRPQLRTSFQQFSSLTNLPLRKLKFSPIKYGYQPRRNFWPARLATRLLKLRYLILGSAVGGGYTAKKTFDQWKDMIPDLSEYKWIVPDIVWEIDEYIDFEKIRKALPSSEDLVKLAPDFDKIVESLSLLKDFFTSGSPEETAFRATDRGSESDKHFRKVSDKEKIDQLQEELLHTQLKYQRILERLEKENKELRKLVLQKDDKGIHHRKLKKSLIDMYSEVLDVLSDYDASYNTQDHLPRVVVVGDQSAGKTSVLEMIAQARIFPRGSGEMMTRSPVKVTLSEGPHHVALFKDSSREFDLTKEEDLAALRHEIELRMRKNVKEGCTVSPETISLNVKGPGLQRMVLVDLPGVINTVTSGMAPDTKETIFSISKAYMQNPNAIILCIQDGSVDAERSIVTDLVSQMDPHGRRTIFVLTKVDLAEKNVASPSRIQQIIEGKLFPMKALGYFAVVTGKGNSSESIEAIREYEEEFFQNSKLLKTSMLKAHQVTTRNLSLAVSDCFWKMVRESVEQQADSFKATRFNLETEWKNNYPRLRELDRNELFEKAKNEILDEVISLSQVTPKHWEEILQQSLWERVSTHVIENIYLPAAQTMNSGTFNTTVDIKLKQWTDKQLPNKAVEVAWETLQEEFSRFMTEPKGKEHDDIFDKLKEAVKEESIKRHKWNDFAEDSLRVIQHNALEDRSISDKQQWDAAIYFMEEALQARLKDTENAIENMVGPDWKKRWLYWKNRTQEQCVHNETKNELEKMLKCNEEHPAYLASDEITTVRKNLESRGVEVDPSLIKDTWHQVYRRHFLKTALNHCNLCRRGFYYYQRHFVDSELECNDVVLFWRIQRMLAITANTLRQQLTNTEVRRLEKNVKEVLEDFAEDGEKKIKLLTGKRVQLAEDLKKVREIQEKLDAFIEALHQEK

SEQ ID NO: 2491 - DNA, 30 bp, synthetic construct
  misc_feature 1..25: note = Oligonucleotide
  source 1..30: mol_type = other DNA
aaatacatatataaaaaggtcattgtaaaa

SEQ ID NO: 2492 - DNA, 30 bp, synthetic construct
  misc_feature 1..26: note = Oligonucleotide
  source 1..30: mol_type = other DNA
gaaatacatatataaaaaggtcattgtaaa

SEQ ID NO: 2493 - DNA, 25 bp, synthetic construct
  misc_feature 1..25: note = Oligonucleotide
  source 1..25: mol_type = other DNA
tacatatataaaaaggtcattgtaa

SEQ ID NO: 2494 - DNA, 30 bp, synthetic construct
  misc_feature 1..28: note = Oligonucleotide
  source 1..30: mol_type = other DNA
tgaaatacatatataaaaaggtcattgtaa

SEQ ID NO: 2495 - DNA, 30 bp, synthetic construct
  misc_feature 1..29: note = Oligonucleotide
  source 1..30: mol_type = other DNA
ctgaaatacatatataaaaaggtcattgta

SEQ ID NO: 2496 - DNA, 30 bp, synthetic construct
  misc_feature 1..30: note = Oligonucleotide
  source 1..30: mol_type = other DNA
aattctgaaatacatatataaaaaggtcat

SEQ ID NO: 2497 - DNA, 30 bp, synthetic construct
  misc_feature 1..30: note = Oligonucleotide
  source 1..30: mol_type = other DNA
aaattctgaaatacatatataaaaaggtca

SEQ ID NO: 2498 - DNA, 25 bp, synthetic construct
  misc_feature 1..25: note = Oligonucleotide
  source 1..25: mol_type = other DNA
ctgaaatacatatataaaaaggtca

SEQ ID NO: 2499 - DNA, 30 bp, synthetic construct
  misc_feature 1..30: note = Oligonucleotide
  source 1..30: mol_type = other DNA
gaaattctgaaatacatatataaaaaggtc

SEQ ID NO: 2500 - DNA, 22 bp, synthetic construct
  misc_feature 1..22: note = Oligonucleotide
  source 1..22: mol_type = other DNA
catgcgcacagtgcgtcggaat

SEQ ID NO: 2501 - DNA, 22 bp, synthetic construct
  misc_feature 1..22: note = Oligonucleotide
  source 1..22: mol_type = other DNA
cctttctaggcgtgcagcacta

SEQ ID NO: 2502 - DNA, 22 bp, synthetic construct
  misc_feature 1..22: note = Oligonucleotide
  source 1..22: mol_type = other DNA
catggacttctgcaagagccta

SEQ ID NO: 2503 - DNA, 22 bp, synthetic construct
  misc_feature 1..22: note = Oligonucleotide
  source 1..22: mol_type = other DNA
cgcatggacttccgcaagagat

SEQ ID NO: 2504 - protein, 30 aa, synthetic construct
RRSRTARAGRPGRNSSRPSAPRGASGGASG
